(19) United States
(12) Patent Application Publication
(10) Pub. No.: US 2010/0313299 A1
(43) Pub. Date: Dec. 9, 2010

(54) PLANTS HAVING ENHANCED YIELD-RELATED TRAITS AND A METHOD FOR MAKING THE SAME

(75) Inventors: Ana Isabel Sanz Molinero, Gentbrugge (BE); Valerie Frankard, Zwijnaarde (BE); Christophe Reuzeaus, Tocan Saint Apre (FR); Ramon Serrano Salom, Valencia (ES); José Miguel Mulet Salort, Valencia (ES)

Correspondence Address: CONNOLLY BOVE LODGE & HUTZ, LLP, P O BOX 2207, WILMINGTON, DE, 19899, US

(73) Assignee: BASF Plant Science GmbH

(21) Appl. No.: 12/744,503

(22) PCT Filed: Nov. 26, 2008
(86) PCT No.: PCT/EP08/66237

§ 371 Date: May 25, 2010

Related U.S. Application Data
(60) Provisional application No. 61/014,757, filed on Dec. 19, 2007.
(60) Provisional application No. 61/014,619, filed on Dec. 18, 2007.
(60) Provisional application No. 61/013,649, filed on Dec. 14, 2007.
(60) Provisional application No. 61/013,648, filed on Dec. 14, 2007.
(60) Provisional application No. 61/027,053, filed on Feb. 8, 2008.
(60) Provisional application No. 61/106,989, filed on Oct. 21, 2008.

(30) Foreign Application Priority Data
Nov. 26, 2007 (EP) 07121546.1
Nov. 26, 2007 (EP) 07121565.1
Dec. 6, 2007 (EP) 07122488.5
Dec. 11, 2007 (EP) 07122911.6
Dec. 12, 2007 (EP) 07122998.3
Oct. 15, 2008 (EP) 08166636.4

(51) Int. Cl. C12N 15/82; A01H 5/00; A01H 5/10; C12N 15/29; C12N 15/63; C12N 5/10

(52) U.S. Cl. 800/278; 800/298; 536/23.6; 530/370; 435/320.1; 435/419; 435/412; 800/320.2; 800/320.1; 800/320.3; 800/320

(57) ABSTRACT

The present invention concerns a method for enhancing yield-related traits in plants by modulating expression in a plant of a nucleic acid encoding a PATL (PATELLIN) polypeptide, or a PRP38 (Precursor RNA Processing factor 38) polypeptide, or an ADA2 (Adaptor 2) polypeptide. The present invention also concerns a method for increasing Thousand Kernel Weight, total weight of seeds and/or number of filled seeds, by modulating expression in a plant of a nucleic acid sequence encoding a GATA-like polypeptide. The invention also concerns a method for increasing various plant yield-related traits by, increasing expression in a plant of a nucleic acid sequence encoding a WD40 repeat (WDR) 23-like polypeptide. The invention also provides hitherto unknown PATL nucleic acids and constructs useful in the methods of the invention.

[0001] The present invention relates generally to the field of molecular biology and concerns a method for enhancing yield related traits by modulating expression in a plant of a nucleic acid encoding a PATL (PATELLIN) polypeptide, or a PRP38 (Precursor RNA Processing factor 38), or a GATA-like polypeptide, or an ADA2 (Transcriptional Adaptor 2) polypeptide, or a WDR23-like polypeptide. The present invention also concerns plants having modulated expression of a nucleic acid encoding a PATL polypeptide, or PRP38, or a GATA-like, or an ADA2 polypeptide, or a WDR23-like which plants have enhanced yield-related traits relative to corresponding wild type plants or other control plants. The invention also provides hitherto unknown PATL, or PRP38, or GATA-like, or ADA2, or WDR23-like nucleic acids and constructs useful in the methods of the invention.

[0002] In one embodiment, the present invention also concerns a method for improving plant growth characteristics by modulating expression in a plant of a nucleic acid encoding a GATA-like polypeptide. The present invention also concerns plants having modulated expression of a nucleic acid encoding a GATA-like polypeptide, which plants have improved growth characteristics relative to corresponding wild type plants or other control plants. The invention also provides constructs useful in the methods of the invention.

[0003] In another embodiment, the present invention concerns a method for increasing various plant yield-related traits by increasing expression in a plant of a nucleic acid sequence encoding a WD40 repeat (WDR) 23-like polypeptide. The present invention also concerns plants having increased expression of a nucleic acid sequence encoding a WDR23-like polypeptide, which plants have increased yield-related traits relative to control plants. The invention additionally relates to specific nucleic acid sequences encoding the aforementioned polypeptides having the aforementioned plant yield increasing activity, nucleic acid constructs, vectors and plants containing said nucleic acid sequences.

[0004] The ever-increasing world population and the dwindling supply of arable land available for agriculture fuels research towards increasing the efficiency of agriculture. Conventional means for crop and horticultural improvements utilise selective breeding techniques to identify plants having desirable characteristics. However, such selective breeding techniques have several drawbacks, namely that these techniques are typically labour intensive and result in plants that often contain heterogeneous genetic components that may not always result in the desirable trait being passed on from parent plants. Advances in molecular biology have allowed mankind to modify the germplasm of animals and plants. Genetic engineering of plants entails the isolation and manipulation of genetic material (typically in the form of DNA or RNA) and the subsequent introduction of that genetic material into a plant. Such technology has the capacity to deliver crops or plants having various improved economic, agronomic or horticultural traits.

[0005] A trait of particular economic interest is increased yield. Yield is normally defined as the measurable produce of economic value from a crop. This may be defined in terms of quantity and/or quality. Yield is directly dependent on several factors, for example, the number and size of the organs, plant architecture (for example, the number of branches), seed production, leaf senescence and more. Root development, nutrient uptake, stress tolerance and early vigour may also be important factors in determining yield. Optimizing the above-mentioned factors may therefore contribute to increasing crop yield.

[0006] Seed yield is a particularly important trait, since the seeds of many plants are important for human and animal nutrition. Crops such as corn, rice, wheat, canola and soybean account for over half the total human caloric intake, whether through direct consumption of the seeds themselves or through consumption of meat products raised on processed seeds. They are also a source of sugars, oils and many kinds of metabolites used in industrial processes. Seeds contain an embryo (the source of new shoots and roots) and an endosperm (the source of nutrients for embryo growth during germination and during early growth of seedlings). The development of a seed involves many genes, and requires the transfer of metabolites from the roots, leaves and stems into the growing seed. The endosperm, in particular, assimilates the metabolic precursors of carbohydrates, oils and proteins and synthesizes them into storage macromolecules to fill out the grain.

[0007] Plant biomass is yield for forage crops like alfalfa, silage corn and hay. Many proxies for yield have been used in grain crops. Chief amongst these are estimates of plant size. Plant size can be measured in many ways depending on species and developmental stage, but include total plant dry weight, above-ground dry weight, above-ground fresh weight, leaf area, stem volume, plant height, rosette diameter, leaf length, root length, root mass, tiller number and leaf number. Many species maintain a conservative ratio between the size of different parts of the plant at a given developmental stage. These allometric relationships are used to extrapolate from one of these measures of size to another (e.g. Tittonell et al 2005 Agric Ecosys & Environ 105: 213). Plant size at an early developmental stage will typically correlate with plant size later in development. A larger plant with a greater leaf area can typically absorb more light and carbon dioxide than a smaller plant and therefore will likely gain a greater weight during the same period (Fasoula & Tollenaar 2005 Maydica 50:39). This is in addition to the potential continuation of the micro-environmental or genetic advantage that the plant had to achieve the larger size initially. There is a strong genetic component to plant size and growth rate (e.g. ter Steege et al 2005 Plant Physiology 139:1078), and so for a range of diverse genotypes plant size under one environmental condition is likely to correlate with size under another (Hittalmani et al 2003 Theoretical Applied Genetics 107:679). In this way a standard environment is used as a proxy for the diverse and dynamic environments encountered at different locations and times by crops in the field.

[0008] Another important trait for many crops is early vigour. Improving early vigour is an important objective of modern rice breeding programs in both temperate and tropical rice cultivars. Long roots are important for proper soil anchorage in water-seeded rice. Where rice is sown directly into flooded fields, and where plants must emerge rapidly through water, longer shoots are associated with vigour. Where drill-seeding is practiced, longer mesocotyls and coleoptiles are important for good seedling emergence. The ability to engineer early vigour into plants would be of great importance in agriculture. For example, poor early vigour has been a limitation to the introduction of maize (Zea mays L.) hybrids based on Corn Belt germplasm in the European Atlantic.

[0009] Harvest index, the ratio of seed yield to aboveground dry weight, is relatively stable under many environmental conditions and so a robust correlation between plant size and grain yield can often be obtained (e.g. Rebetzke et al 2002 Crop Science 42:739). These processes are intrinsically linked because the majority of grain biomass is dependent on current or stored photosynthetic productivity by the leaves and stem of the plant (Gardener et al 1985 Physiology of Crop Plants. Iowa State University Press, pp 68-73). Therefore, selecting for plant size, even at early stages of development, has been used as an indicator for future potential yield (e.g. Tittonell et al 2005 Agric Ecosys & Environ 105: 213). When testing for the impact of genetic differences on stress tolerance, the ability to standardize soil properties, temperature, water and nutrient availability and light intensity is an intrinsic advantage of greenhouse or plant growth chamber environments compared to the field. However, artificial limitations on yield due to poor pollination due to the absence of wind or insects, or insufficient space for mature root or canopy growth, can restrict the use of these controlled environments for testing yield differences. Therefore, measurements of plant size in early development, under standardized conditions in a growth chamber or greenhouse, are standard practices to provide indication of potential genetic yield advantages.

[0010] Another trait of importance is that of improved abiotic stress tolerance. Abiotic stress is a primary cause of crop loss worldwide, reducing average yields for most major crop plants by more than 50% (Wang et al. (2003) Planta 218: 1-14). Abiotic stresses may be caused by drought, salinity, extremes of temperature, chemical toxicity, excess or deficiency of nutrients (macroelements and/or microelements), radiation and oxidative stress. The ability to increase plant tolerance to abiotic stress would be of great economic advantage to farmers worldwide and would allow for the cultivation of crops during adverse conditions and in territories where cultivation of crops may not otherwise be possible.

[0011] Crop yield may therefore be increased by optimising one of the above-mentioned factors.

[0012] Depending on the end use, the modification of certain yield traits may be favoured over others. For example for applications such as forage or wood production, or bio-fuel resource, an increase in the vegetative parts of a plant may be desirable, and for applications such as flour, starch or oil production, an increase in seed parameters may be particularly desirable. Even amongst the seed parameters, some may be favoured over others, depending on the application. Various mechanisms may contribute to increasing seed yield, whether that is in the form of increased seed size or increased seed number.

[0013] One approach to increasing yield-related traits (seed yield and/or biomass) in plants may be through modification of the inherent growth mechanisms of a plant, such as the cell cycle or various signalling pathways involved in plant growth or in defence mechanisms.

[0014] It has now been found that various yield-related traits may be enhanced in plants by modulating expression in a plant of a nucleic acid encoding a PATL (Patellin) polypeptide, or a PRP38 (Precursor RNA Processing factor 38), or an ADA2 (Transcriptional Adaptor 2) polypeptide, or a WD40 repeat (WDR) 23-like polypeptide.

[0015] It has furthermore been found that various growth characteristics may be improved in plants by modulating expression in a plant of a nucleic acid encoding a GATA-like (Protein Of Interest) in a plant.

[0016] The increased yield-related traits comprise one or more of: increased total seed yield per plant, increased seed filling rate, increased number of filled seeds, increased harvest index, or increased thousand kernel weight.

[0017] Lipids are substances soluble in non-polar solvents, such as chloroform or ether. Lipids are essential components in living organisms. Lipid such as glycolipids, phospholipids, and cholesterol are key structural components of cell membranes, and triglycerides are the biological energy-source molecules. Phosphatidylinositide (Ptdlns) and Phosphatidylcholine (PtdCho) are examples of phospholipids. Interactions between lipids and proteins function in targeting proteins and glycolipids involved in a variety of processes, such as cell signaling and cell proliferation, to specific membrane and intracellular locations. Various proteins are associated with the biosynthesis, transport, and uptake of lipids. In addition, key proteins involved in signal transduction and protein targeting have lipid-derived groups added to them post-translationally (Stryer, L. (1995) Biochemistry, W.H. Freeman and Co., New York N.Y., pp. 264-267, 934).

[0018] Phosphatidylinositol/phosphatidylcholine transfer proteins (PIPTs) are ubiquitous proteins involved in coordinate regulation of Ptdlns and PtdCho metabolism by facilitating the transfer among the different membrane compartments of eukatyotic cells. In yeast, the major PIPT is the SEC14 protein which is essential for secretion from the trans-Golgi network (Bankatis et al. 1989, J. Cell Biol. 108:1271-81). Similar proteins are found in plants and other higher organisms. In plants, several SEC14 homologs have been described to have around 25% amino acid sequence similarity to the yeast S. cerevisiae SEC14 protein and in some instances the putative PtdIns/PtdCho transfer function has been experimentally verified by complementation of the sec14-1 temperature-sensitive yeast mutant (Jouannic et al. 1998). Plant SEC14 proteins reportedly play a role in diverse biological processes such as cytokinesis, hyperosmosis stress-induced signalling pathway, vesicle trafficking between various membranes or membrane biogenesis during nodulation (Allen-Baume et al. 2002; FEBs Letters 531: 74-80; Peterman et al. 2004. Plant Phys. 136: 3080-3094; Monks et al. 2001, Plant Cell 13:1205-19; Kapranov et al. 2001 Plant Cell 13:1369-1382).

[0019] In Arabidopsis thaliana the Patellin1 (PATL1) protein, a member of the SEC14 homolog protein family, has been reported to localize to the cell plate during cytokinesis and shown to have Ptdlns binding activiy. PATL1 is a member of a small family of six proteins in Arabidopsis characterized by the presence of two conserved domains, a SEC14 and a GOLD (Golgi dynamics) domain.

[0020] The SEC14 domain is found in the SEC14 protein of yeast and in in RhoGAPs, RhoGEFs and the RasGAP, neurofibromin (NF1). It is also found in C-terminal of various retinaldehyde/retinal-binding proteins (CRAL-BP) that may be functional components of the visual cycle and in the Trio protein, a multifunctional factor that integrates and amplifies signals involved in actin remodelling. SEC14 is sometimes refer to as CRAL_TRIO domain. SEC14 domain is involved in lipid binding (Sha and Luo. 1999. Biochim Biophys Acta. 1441: 268-77).

[0021] The GOLD domain is a protein module found in several eukaryotic Golgi and lipid-traffic proteins. It is typically between 90 and 150 amino acids long. Most of the size difference observed in the GOLD-domain superfamily is traceable to a single large low-complexity insert that is seen in some versions of the domain. GOLD domains occur in proteins that may interact with membranes or which may have a role in the interaction of various proteins with cytoskeletal filaments such as animal SEC14 proteins or the yeast oxysterol-binding protein homolog 3 (OSH3). The GOLD domain is predicted to mediate diverse protein-protein interactions (Anantharaman et al. 2002. Genome Biol. 3).

[0022] The patent application WO 2004/090141 describes a partial PATL protein involved in stress tolerance.

[0023] The synthesis and function of messenger RNA (mRNA) in a cell requires a series of events including transcription, processing, transport, translation and degradation. RNA processing refers to events modifying RNA posttranscriptionally. In eukaryotic organisms the majority of the nascent pre-mRNA contains introns, which are spliced out resulting in the precise ligation of exons to produce a mature mRNA, which is the RNA form used by the ribosomes to translate into a protein. Posttranscriptional modification of RNAs also includes capping at the 5′ end and polyadenylation at the 3′ end, which affects stability and the efficiency of translation. The relationship between mRNA translation and turnover is critical to the regulation of gene expression and to the correct functioning of the cell. In eukaryotic organisms, several tens of proteins are involved in RNA metabolism. An example of such a protein is the pre-mRNA splicing factor PRP38.

[0024] Yeast PRP38 was identified in a genetic screen of temperature-sensitive mutants of Saccharomyces cerevisiae defective in pre-mRNA splicing (Blanton et al. 1992, Mol. Cel. Biol. 12, 3939-3947). The excision of intervening sequences from eukaryotic pre-mRNA transcripts occurs in the nucleus on a large, complex structure termed the spliceosome. The spliceosome directs intron removal by a two-step mechanism comprising (i) cleavage at the 5′ splice site and ligation of the 5′-terminal nucleotide of the intron to an adenosine near the 3′ end on the intron and (ii) cleavage at the 3′ splice site and exon ligation. Assembly of the spliceosome progresses by the sequential addition of the U1, U2. U4/U6 and U5 snRNPs (Small Ribonuclear Proteins U1-U6). Late in the assembly process the U4 disassociates from the spliceosome. The catalytic events of splicing leading to intron removal in pre-mRNA molecules are believed to occur subsequent to U4 dissociation. In yeast, PRP38 is reportedly dispensable for spliceosome assembly but required for conformational changes which lead to catalytic activation of the spliceosome (Xie et al. (1998) EMBO Journal Vol. 17 pp. 2938-2946).

[0025] In Arabidopsis thaliana, PRP38 protein (AtPRP38) was named SRL1 (SR like 1), after its sequence similarity with SR proteins (Forment et al. Plant J. 2002 June; 30(5):511-9. However PRP38 is structurally distinct from other SR proteins. Typically SR proteins comprise an RRM domain (RNA binding domain) and an RS domain (Kalyna and Barta Biochem Soc Trans. 2004 32:561-4.), while AtPRP38 comprises the RS domain, but lacks the RRM domain.

[0026] WO 01/81599 describes methods to improve stress tolerance in yeast and plants using nucleic acids encoding several SR proteins. SRL1 as well as other proteins functioning in pre-mRNA splicing have been found to play an important role in plant responses to abiotic stresses (Lee et al. 2006 Plant Cell. July; 18(7):1736-49).

[0027] The GATA family forms one of the major families in Cys2/Cys2-type zinc finger transcription factor in eukaryotes (found e.g. in cellular slime mold, plants, fungi, nematodes, insects, echinoderms, vertebrates) and contain either 1 or 2 highly conserved zinc finger DNA binding domains. The DNA-binding consensus is CX₂CX₁₇₋₂₀CX₂C and contains the zinc atom coordinated by the conserved 4 cysteines (Omichinski et al., 1993; Reyes et al., 2004). This domain is typically followed by a basic region. It characteristically binds DNA at the GATA recognition sequence (A/T)GATA(A/G) (Martin and Orkin, 1990; Omichinski et al., 2003). Animal GATAs typically contain 17 residues between second and third cystein, whereas in fungi this can be 17-18 (rarely 19 or 20). Plants have 18 or 20 residues between the second and third cystein.

[0028] The original GATA1 was identified as a transcription factor required to promote the expression of globin genes in humans (Pevny et al., 1991). The first plant GATA (NTL1) was isolated form tobacco as a plant homologue of the Neurospora crassa transcription factor NIT2, a protein that activates the expression of the genes for nitrogen-metabolic enzymes during nitrogen-limiting conditions. NTL1 contains 18 spacings between the second and the third cysteine (CX₂CX₁₈CX₂C) (Daniel-Vedele and Caboche, 1997). The genomes of Arabidopsis thaliana and Oryza sativa present 29 and 28 loci respectively that encode for putative GATA transcription factors (CX₂CX₁₈ₒᵣ₂₀CX₂C) (Reyes et al., 2004): Arabidopsis only has proteins with one GATA domain, while Oryza sativa has two proteins containing two and one protein containing three GATA domains. The rice transcription factors database (DRTF, Gao et al. Bioinformatics 2006, 22, 1286-1287) claim 28 GATAs in Indica and 23 in Japonica. The GATA family of transcription factors in rice and Arabidopsis can be divided into 7 subfamilies, some of these represented in both species but others are exclusive for one of them.

[0029] Ectopic expression of a GATA-like protein (HAN) under control of the strong constitutive 35S promoter seriously affected plant viability and development (Zhao et al. Plant Cell 16, 2586-2600, 2004). The transformed plants were dwarfed with abnormally formed leaves and smaller and malformed inflorescences. US2007/0250956 discloses OsGATA11 and its use for increasing seed yield.

[0030] The regulation of transcription in plants underlies many biological processes such as adaptation to environment and regulation of metabolic and physiological balances. Therefore altering gene transcription in a plant may result in profound modifications of plant growth and development. This property may be used to improve performance of crop plants. There are hundreds of genes controlling gene expression and only a few of them have been shown to have a beneficial effect on traits of interest to agriculture industry, when its expression is modulated in the plan (Vinocur and Altman, 2005, Current Opinion in Biotechnology 16,123-132; Gutterson and Reuber 2004. Current Opinion in Plant Biology, 7, 465-471). The availability to modulate gene expression in order to enhance yield traits would contribute improve crop performance and ultimately benefit agriculture based industries.

[0031] In eukaryotes, gene expression is coupled to chromatin modifications resulting in promoters becoming more accessible to RNA Polymerase II and other components of the transcriptional apparatus. Two main classes of protein complexes influence chromatin dynamics. One class comprises ATP-dependent chromatin-remodeling machines (SWI/SNF related complexes) and a second class comprises complexes that modify histone proteins. One such histone modification, mediated by histone acetyltransferases (HATs), may be by acetylacion of specific Lysine residues present in the N-terminus of core histones (Narlikar et al. 2002 Cell 108, 475-487). One of the prototypical histone acetyltransferases that functions as a transcriptional coactivator is known as Gcn5. In yeast, Gcn5 forms distinct protein complexes known to comprise different adaptor proteins such as ADA, SAGA, SALSA and SLIK [18-20]. Homologous complexes have been identified in higher eukaryotes including plants. In Arabidopsis thaliana two paralogous genes encoding ADA2 proteins have been described (Stockinger et al. 2001 Nucleic acid research 29, 1524-1533).

[0032] General transcription factors recruit RNA polymerase II to the TATA box of promoters while transcriptional activators bind to specific DNA sequences called the upstream activating sites (UAS). General transcription factors may interact directly with the transcriptional activator or through the adaptor proteins. Typically adaptor proteins interact with the transcription activator via the activation domain though interactions via the DNA biding domain have also been described (Mao et al. 2006. Biochimica et Biophysica Acta 1759 69-79).

[0033] In Arabidopsis thaliana ADA2 proteins reportedly enhance the ability of GCN5 to acetylate histones in vitro and modulate the substrates specificity of GCN5. Moreover, GCN5 can acetylate the ADA2 proteins at a motif unique to the plant homologs and absent from fungal and animal homologs (Mao et al. 2006). T-DNA insertion mutations in ADA2b and GCN5 were found to have pleiotropic effects on plant growth and development, including dwarf size, aberrant root development, and short petals and stamens in flowers (Vlachonasios et al. 2003 The Plant Cell, Vol. 15, 626-638). Genes encoding transcriptional adaptor proteins originating from other plant species have also been disclosed (WO0003026).

[0034] The regulation of many different cellular processes requires the use of protein interaction domains to direct association of polypeptides with one another, and with phospholipids, small molecules, or nucleic acids. One such protein interaction domain is called the WD repeat (see review Smith et al. (1999) TIBS 24: 181-185). WD repeat containing proteins are largely represented in most organisms, for example, more than 300 are counted in H. sapiens, more than 140 in C. elegans, more than 390 in A. thaliana, and more than 90 in S. cereviseae. Although structurally related by the presence of WD repeats (between 4 and 16 copies in one polypeptide), these proteins have very diverse functions.

[0035] The WD repeat is loosely defined at the primary sequence level by a Gly-His (GH) dipeptide 10-20 residues N-terminal from a Trp-Asp (WD) dipeptide (located at the C-terminus of the motif), and is typically approximately 40 (but up to 60) residues in length (hence the “WD40” name). However, neither the GH dipeptide nor the WD dipeptide is absolutely conserved. Between GH and WD is a conserved core sequence that can be identified using algorithms available, for example, at InterPro, hosted by the European Bioinformatics Institute (EBI) in the UK. InterPro is a database of protein families, domains and functional sites in which identifiable features found in known proteins can be applied to unknown protein sequences.

[0036] WD40 proteins are predicted to form a beta propeller-like structure (a circular repeating structure), which contains three potential interacting surfaces: the top, the bottom, and the circumference. This expansive surface area allows a WD40 protein to form complexes reversibly with several proteins, thus coordinating sequential and/or simultaneous interactions involving several sets of protein.

[0037] Among the very important protein complexes involving WD40 proteins is a class of multiprotein ubiquitin E3 ligases of which Cullin 4 (CUL4) and damaged DNA binding protein 1 (DDB1) are the core proteins (Higa et al. (2007) Cell Division 2:5; Angers et al. (2006) Nature 443: 590-593; Higa et al. (2006) Nature Cell Biol 8(11): 1277-1283; He et al. (2006) Genes & Development 20: 2949-2954). This complex docks WD40 proteins as molecular adaptors for substrate recruiting mechanism, which substrate will subsequently be ubiquitinated and destroyed. These WD40 proteins form a subclass called DCAF (DDB1-CUL4A-associated factor), and comprise two conserved DxR motifs at the end of two consecutive WD40 repeats (He et al. (2006) supra).

[0038] One such WD40 protein, WDR23 (WD repeat 23; also called DCAF11) has signicant primary sequence identity with a WD40 protein found in plants. This WD40 protein was first identified in Lithospermum erythrorhizon as clone 14B (LEC14B; NCBI accession number D83074).

[0039] In patent application WO2002/016655, SEQ ID NO: 2577 relates to an Arabidopsis thaliana nucleic acid sequence encoding a WDR23-like polypeptide, and is described a method of identifying a stress condition to which a plant cell has been exposed, using any one or more of SEQ ID NO: 1 through SEQ ID NO: 5379. In US patent application US2004/034888, SEQ ID NO: 13,294 relates to an Arabidopsis thaliana nucleic acid sequence encoding a WDR23-like polypeptide, and is described a method of producing a plant having an improved property, using any one or more of SEQ ID NO: 1 through SEQ ID NO: 36,564.

[0040] Surprisingly, it has now been found that modulating expression of a nucleic acid encoding a PRP38 polypeptide gives plants having enhanced (or improved) yield-related traits, in particular increased yield relative to control plants, also in conditions other than osmotic stress caused by salt, drought, cold or freezing.

[0041] Also surprisingly, it has now been found that modulating (preferably increasing) expression of a nucleic acid encoding a GATA-like polypeptide gives plants having significantly increased Thousand Kernel Weight (TKW) relative to control plants, while other seed yield parameters such as number of seeds (filled seeds or total number of seeds) were not significantly increased.

[0042] Furthermore, surprisingly, it has now been found that modulating expression of a nucleic acid encoding an ADA2 polypeptide gives plants having enhanced yield-related traits, in particular increased yield relative to control plants.

[0043] Also surprisingly, it has now been found that increasing expression of a nucleic acid sequence encoding a WDR23-like polypeptide as defined herein gives plants having increased yield-related traits relative to control plants.

[0044] Furthermore, surprisingly, it has now been found that modulating expression of a nucleic acid encoding a PATL polypeptide gives plants having enhanced yield-related traits, in particular increased yield relative to control plants.

[0045] According one embodiment of the present invention, there is provided a method for improving (or enhancing) yield related traits in a plant relative to control plants, comprising modulating expression of a nucleic acid encoding a PATL polypeptide, or a PRP38, or an ADA2 polypeptide in a plant.

[0046] According to another embodiment, there is provided a method for increasing Thousand Kernel Weight (TKW) relative to control plants, comprising modulating (preferably increasing) expression of a nucleic acid encoding a GATA-like polypeptide in a plant.

[0047] According to another embodiment, there is provided a method for increasing yield-related traits in plants relative to control plants, comprising increasing expression of a nucleic acid sequence encoding a WDR23-like polypeptide as defined herein, in a plant. The increased yield-related traits comprise one or more of: increased total seed yield per plant, increased seed filling rate, increased number of filled seeds, increased harvest index, or increased thousand kernel weight.

### DEFINITIONS

### Polypeptide(s)/Protein(s)

[0048] The terms “polypeptide” and “protein” are used interchangeably herein and refer to amino acids in a polymeric form of any length, linked together by peptide bonds.

Polynucleotide(s)/Nucleic acid(s)/Nucleic Acid Sequence(s)/Nucleotide Sequence(s)

[0049] The terms “polynucleotide(s)”, “nucleic acid sequence(s)”, “nucleotide sequence(s)”, “nucleic acid(s)”, “nucleic acid molecule” are used interchangeably herein and refer to nucleotides, either ribonucleotides or deoxyribonucleotides or a combination of both, in a polymeric unbranched form of any length.

### Control Plant(s)

[0050] The choice of suitable control plants is a routine part of an experimental setup and may include corresponding wild type plants or corresponding plants without the gene of interest. The control plant is typically of the same plant species or even of the same variety as the plant to be assessed. The control plant may also be a nullizygote of the plant to be assessed. Nullizygotes are individuals missing the transgene by segregation. A “control plant” as used herein refers not only to whole plants, but also to plant parts, including seeds and seed parts.

### Homoloque(s)

[0051] “Homologues” of a protein encompass peptides, oligopeptides, polypeptides, proteins and enzymes having amino acid substitutions, deletions and/or insertions relative to the unmodified protein in question and having similar biological and functional activity as the unmodified protein from which they are derived.

[0052] A deletion refers to removal of one or more amino acids from a protein.

[0053] An insertion refers to one or more amino acid residues being introduced into a predetermined site in a protein. Insertions may comprise N-terminal and/or C-terminal fusions as well as intra-sequence insertions of single or multiple amino acids. Generally, insertions within the amino acid sequence will be smaller than N- or C-terminal fusions, of the order of about 1 to 10 residues. Examples of N- or C-terminal fusion proteins or peptides include the binding domain or activation domain of a transcriptional activator as used in the yeast two-hybrid system, phage coat proteins, (histidine)-6-tag, glutathione S-transferase-tag, protein A, maltose-binding protein, dihydrofolate reductase, Tag•100 epitope, c-myc epitope, FLAG®-epitope, lacZ, CMP (calmodulin-binding peptide), HA epitope, protein C epitope and VSV epitope.

[0054] A substitution refers to replacement of amino acids of the protein with other amino acids having similar properties (such as similar hydrophobicity, hydrophilicity, antigenicity, propensity to form or break a-helical structures or β-sheet structures). Amino acid substitutions are typically of single residues, but may be clustered depending upon functional constraints placed upon the polypeptide; insertions will usually be of the order of about 1 to 10 amino acid residues. The amino acid substitutions are preferably conservative amino acid substitutions. Conservative substitution tables are well known in the art (see for example Creighton (1984) Proteins. W.H. Freeman and Company (Eds) and Table 1 below).

TABLE 1
Examples of conserved amino acid substitutions

| | Conservative |
|---|---|
| Residue | Substitutions |
| Ala | Ser |
| Arg | Lys |
| Asn | Gln; His |
| Asp | Glu |
| Gln | Asn |
| Cys | Ser |
| Glu | Asp |
| Gly | Pro |
| His | Asn; Gln |
| Ile | Leu, Val |
| Leu | Ile; Val |
| Lys | Arg; Gln |
| Met | Leu; Ile |
| Phe | Met; Leu; Tyr |
| Ser | Thr; Gly |
| Thr | Ser; Val |
| Trp | Tyr |
| Tyr | Trp; Phe |
| Val | Ile; Leu |

[0055] Amino acid substitutions, deletions and/or insertions may readily be made using peptide synthetic techniques well known in the art, such as solid phase peptide synthesis and the like, or by recombinant DNA manipulation. Methods for the manipulation of DNA sequences to produce substitution, insertion or deletion variants of a protein are well known in the art. For example, techniques for making substitution mutations at predetermined sites in DNA are well known to those skilled in the art and include M13 mutagenesis, T7-Gen in vitro mutagenesis (USB, Cleveland, Ohio), QuickChange Site Directed mutagenesis (Stratagene, San Diego, Calif.), PCR-mediated site-directed mutagenesis or other site-directed mutagenesis protocols.

### Derivatives

[0056] “Derivatives” include peptides, oligopeptides, polypeptides which may, compared to the amino acid sequence of the naturally-occurring form of the protein, such as the Patellin, or the Precursor RNA Processing factor 38, or a GATA-like polypeptide, or the Adaptor 2, or the WDR23-like polypeptide, comprise substitutions of amino acids with non-naturally occurring amino acid residues, or additions of non-naturally occurring amino acid residues. “Derivatives” of a protein also encompass peptides, oligopeptides, polypeptides which comprise naturally occurring altered (glycosylated, acylated, prenylated, phosphorylated, myristoylated, sulphated etc.) or non-naturally altered amino acid residues compared to the amino acid sequence of a naturally-occurring form of the polypeptide. A derivative may also comprise one or more non-amino acid substituents or additions compared to the amino acid sequence from which it is derived, for example a reporter molecule or other ligand, covalently or non-covalently bound to the amino acid sequence, such as a reporter molecule which is bound to facilitate its detection, and non-naturally occurring amino acid residues relative to the amino acid sequence of a naturally-occurring protein. Furthermore, “derivatives” also include fusions of the naturally-occurring form of the protein with tagging peptides such as FLAG, HIS6 or thioredoxin (for a review of tagging peptides, see Terpe, Appl. Microbiol. Biotechnol. 60, 523-533, 2003).

### Ortholoque(s)/Paraloque(s)

[0057] Orthologues and paralogues encompass evolutionary concepts used to describe the ancestral relationships of genes. Paralogues are genes within the same species that have originated through duplication of an ancestral gene; orthologues are genes from different organisms that have originated through speciation, and are also derived from a common ancestral gene.

### Domain

[0058] The term “domain” refers to a set of amino acids conserved at specific positions along an alignment of sequences of evolutionarily related proteins. While amino acids at other positions can vary between homologues, amino acids that are highly conserved at specific positions indicate amino acids that are likely essential in the structure, stability or function of a protein. Identified by their high degree of conservation in aligned sequences of a family of protein homologues, they can be used as identifiers to determine if any polypeptide in question belongs to a previously identified polypeptide family.

### Motif/Consensus Sequence/Signature

[0059] The term “motif” or “consensus sequence” or “signature” refers to a short conserved region in the sequence of evolutionarily related proteins. Motifs are frequently highly conserved parts of domains, but may also include only part of the domain, or be located outside of conserved domain (if all of the amino acids of the motif fall outside of a defined domain).

### Hybridisation

[0060] The term “hybridisation” as defined herein is a process wherein substantially homologous complementary nucleotide sequences anneal to each other. The hybridisation process can occur entirely in solution, i.e. both complementary nucleic acids are in solution. The hybridisation process can also occur with one of the complementary nucleic acids immobilised to a matrix such as magnetic beads, Sepharose beads or any other resin. The hybridisation process can furthermore occur with one of the complementary nucleic acids immobilised to a solid support such as a nitro-cellulose or nylon membrane or immobilised by e.g. photolithography to, for example, a siliceous glass support (the latter known as nucleic acid arrays or microarrays or as nucleic acid chips). In order to allow hybridisation to occur, the nucleic acid molecules are generally thermally or chemically denatured to melt a double strand into two single strands and/or to remove hairpins or other secondary structures from single stranded nucleic acids.

[0061] The term “stringency” refers to the conditions under which a hybridisation takes place. The stringency of hybridisation is influenced by conditions such as temperature, salt concentration, ionic strength and hybridisation buffer composition. Generally, low stringency conditions are selected to be about 30° C. lower than the thermal melting point (Tₘ) for the specific sequence at a defined ionic strength and pH. Medium stringency conditions are when the temperature is 20° C. below Tₘ, and high stringency conditions are when the temperature is 10° C. below Tₘ. High stringency hybridisation conditions are typically used for isolating hybridising sequences that have high sequence similarity to the target nucleic acid sequence. However, nucleic acids may deviate in sequence and still encode a substantially identical polypeptide, due to the degeneracy of the genetic code. Therefore medium stringency hybridisation conditions may sometimes be needed to identify such nucleic acid molecules.

[0062] The Tm is the temperature under defined ionic strength and pH, at which 50% of the target sequence hybridises to a perfectly matched probe. The Tₘ is dependent upon the solution conditions and the base composition and length of the probe. For example, longer sequences hybridise specifically at higher temperatures. The maximum rate of hybridisation is obtained from about 16° C. up to 32° C. below Tₘ. The presence of monovalent cations in the hybridisation solution reduce the electrostatic repulsion between the two nucleic acid strands thereby promoting hybrid formation; this effect is visible for sodium concentrations of up to 0.4M (for higher concentrations, this effect may be ignored). Formamide reduces the melting temperature of DNA-DNA and DNA-RNA duplexes with 0.6 to 0.7° C. for each percent formamide, and addition of 50% formamide allows hybridisation to be performed at 30 to 45° C., though the rate of hybridisation will be lowered. Base pair mismatches reduce the hybridisation rate and the thermal stability of the duplexes. On average and for large probes, the Tm decreases about 1° C. per % base mismatch. The Tm may be calculated using the following equations, depending on the types of hybrids:

1) DNA-DNA hybrids (Meinkoth and Wahl, Anal. Biochem., 138: 267-284, 1984):

Tₘ=81.5° C.+16.6×log₁₀[Na⁺]^{a}+0.41×% [G/C^{b}]−500×[L^{c}]⁻¹−0.61×% formamide

2) DNA-RNA or RNA-RNA hybrids:

Tm=79.8+18.5(log₁₀[Na⁺]^{a})+0.58 (% G/C^{b})+11.8 (% G/C^{b})²−820/L^{c}

3) oligo-DNA or oligo-RNA^{d} hybrids:
[0063] For <20 nucleotides: Tₘ=2 (lₐ)
[0064] For 20-35 nucleotides: Tₘ=22+1.46 (lₙ)
   ^{a} or for other monovalent cation, but only accurate in the 0.01-0.4 M range.
   ^{b} only accurate for % GC in the 30% to 75% range.
   ^{c} L=length of duplex in base pairs.
   ^{d} oligo, oligonucleotide; lₙ, =effective length of primer=2×(no. of G/C)+(no. of A/T).

[0065] Non-specific binding may be controlled using any one of a number of known techniques such as, for example, blocking the membrane with protein containing solutions, additions of heterologous RNA, DNA, and SDS to the hybridisation buffer, and treatment with Rnase. For non-homologous probes, a series of hybridizations may be performed by varying one of (i) progressively lowering the annealing temperature (for example from 68° C. to 42° C.) or (ii) progressively lowering the formamide concentration (for example from 50% to 0%). The skilled artisan is aware of various parameters which may be altered during hybridisation and which will either maintain or change the stringency conditions.

[0066] Besides the hybridisation conditions, specificity of hybridisation typically also depends on the function of post-hybridisation washes. To remove background resulting from non-specific hybridisation, samples are washed with dilute salt solutions. Critical factors of such washes include the ionic strength and temperature of the final wash solution: the lower the salt concentration and the higher the wash temperature, the higher the stringency of the wash. Wash conditions are typically performed at or below hybridisation stringency. A positive hybridisation gives a signal that is at least twice of that of the background. Generally, suitable stringent conditions for nucleic acid hybridisation assays or gene amplification detection procedures are as set forth above. More or less stringent conditions may also be selected. The skilled artisan is aware of various parameters which may be altered during washing and which will either maintain or change the stringency conditions.

[0067] For example, typical high stringency hybridisation conditions for DNA hybrids longer than 50 nucleotides encompass hybridisation at 65° C. in 1×SSC or at 42° C. in 1×SSC and 50% formamide, followed by washing at 65° C. in 0.3×SSC. Examples of medium stringency hybridisation conditions for DNA hybrids longer than 50 nucleotides encompass hybridisation at 50° C. in 4×SSC or at 40° C. in 6×SSC and 50% formamide, followed by washing at 50° C. in 2×SSC. The length of the hybrid is the anticipated length for the hybridising nucleic acid. When nucleic acids of known sequence are hybridised, the hybrid length may be determined by aligning the sequences and identifying the conserved regions described herein. 1×SSC is 0.15M NaCl and 15 mM sodium citrate; the hybridisation solution and wash solutions may additionally include 5×Denhardt's reagent, 0.5-1.0% SDS, 100 μg/ml denatured, fragmented salmon sperm DNA, 0.5% sodium pyrophosphate.

[0068] For the purposes of defining the level of stringency, reference can be made to Sambrook et al. (2001) Molecular Cloning: a laboratory manual, 3^{rd} Edition, Cold Spring Harbor Laboratory Press, CSH, New York or to Current Protocols in Molecular Biology, John Wiley & Sons, N.Y. (1989 and yearly updates).

### Splice Variant

[0069] The term “splice variant” as used herein encompasses variants of a nucleic acid sequence in which selected introns and/or exons have been excised, replaced, displaced or added, or in which introns have been shortened or lengthened. Such variants will be ones in which the biological activity of the protein is substantially retained; this may be achieved by selectively retaining functional segments of the protein. Such splice variants may be found in nature or may be manmade. Methods for predicting and isolating such splice variants are well known in the art (see for example Foissac and Schiex (2005) BMC Bioinformatics 6: 25).

### Allelic Variant

[0070] Alleles or allelic variants are alternative forms of a given gene, located at the same chromosomal position. Allelic variants encompass Single Nucleotide Polymorphisms (SNPs), as well as Small Insertion/Deletion Polymorphisms (INDELs). The size of INDELs is usually less than 100 bp. SNPs and INDELs form the largest set of sequence variants in naturally occurring polymorphic strains of most organisms.

### Gene Shuffling/Directed Evolution

[0071] Gene shuffling or directed evolution consists of iterations of DNA shuffling followed by appropriate screening and/or selection to generate variants of nucleic acids or portions thereof encoding proteins having a modified biological activity (Castle et al., (2004) Science 304(5674): 1151-4; U.S. Pat. Nos. 5,811,238 and 6,395,547).

### Regulatory Element/Control Sequence/Promoter

[0072] The terms “regulatory element”, “control sequence” and “promoter” are all used interchangeably herein and are to be taken in a broad context to refer to regulatory nucleic acid sequences capable of effecting expression of the sequences to which they are ligated. The term “promoter” typically refers to a nucleic acid control sequence located upstream from the transcriptional start of a gene and which is involved in recognising and binding of RNA polymerase and other proteins, thereby directing transcription of an operably linked nucleic acid. Encompassed by the aforementioned terms are transcriptional regulatory sequences derived from a classical eukaryotic genomic gene (including the TATA box which is required for accurate transcription initiation, with or without a CCAAT box sequence) and additional regulatory elements (i.e. upstream activating sequences, enhancers and silencers) which alter gene expression in response to developmental and/or external stimuli, or in a tissue-specific manner. Also included within the term is a transcriptional regulatory sequence of a classical prokaryotic gene, in which case it may include a −35 box sequence and/or −10 box transcriptional regulatory sequences. The term “regulatory element” also encompasses a synthetic fusion molecule or derivative that confers, activates or enhances expression of a nucleic acid molecule in a cell, tissue or organ.

[0073] A “plant promoter” comprises regulatory elements, which mediate the expression of a coding sequence segment in plant cells. Accordingly, a plant promoter need not be of plant origin, but may originate from viruses or micro-organisms, for example from viruses which attack plant cells. The “plant promoter” can also originate from a plant cell, e.g. from the plant which is transformed with the nucleic acid sequence to be expressed in the inventive process and described herein. This also applies to other “plant” regulatory signals, such as “plant” terminators. The promoters upstream of the nucleotide sequences useful in the methods of the present invention can be modified by one or more nucleotide substitution(s), insertion(s) and/or deletion(s) without interfering with the functionality or activity of either the promoters, the open reading frame (ORF) or the 3′-regulatory region such as terminators or other 3′ regulatory regions which are located away from the ORF. It is furthermore possible that the activity of the promoters is increased by modification of their sequence, or that they are replaced completely by more active promoters, even promoters from heterologous organisms. For expression in plants, the nucleic acid molecule must, as described above, be linked operably to or comprise a suitable promoter which expresses the gene at the right point in time and with the required spatial expression pattern.

[0074] For the identification of functionally equivalent promoters, the promoter strength and/or expression pattern of a candidate promoter may be analysed for example by operably linking the promoter to a reporter gene and assaying the expression level and pattern of the reporter gene in various tissues of the plant. Suitable well-known reporter genes include for example beta-glucuronidase or beta-galactosidase. The promoter activity is assayed by measuring the enzymatic activity of the beta-glucuronidase or beta-galactosidase. The promoter strength and/or expression pattern may then be compared to that of a reference promoter (such as the one used in the methods of the present invention). Alternatively, promoter strength may be assayed by quantifying mRNA levels or by comparing mRNA levels of the nucleic acid used in the methods of the present invention, with mRNA levels of housekeeping genes such as 18S rRNA, using methods known in the art, such as Northern blotting with densitometric analysis of autoradiograms, quantitative real-time PCR or RT-PCR (Heid et al., 1996 Genome Methods 6: 986-994). Generally by “weak promoter” is intended a promoter that drives expression of a coding sequence at a low level. By “low level” is intended at levels of about 1/10,000 transcripts to about 1/100,000 transcripts, to about 1/500,0000 transcripts per cell. Conversely, a “strong promoter” drives expression of a coding sequence at high level, or at about 1/10 transcripts to about 1/100 transcripts to about 1/1000 transcripts per cell. Generally, by “medium strength promoter” is intended a promoter that drives expression of a coding sequence at a lower level than a strong promoter, in particular at a level that is in all instances below that obtained when under the control of a 35S CaMV promoter. Typically a medium strength promoter is able to drive expression of a nucleic acid at least 3, 5, 10, 15, 20, 25, 30, 35, 40, 45, 50, 60, 70, 80, 90, 100 times lower that of the 35S CaMV promoter.

### Operably Linked

[0075] The term “operably linked” as used herein refers to a functional linkage between the promoter sequence and the gene of interest, such that the promoter sequence is able to initiate transcription of the gene of interest.

### Constitutive Promoter

[0076] A “constitutive promoter” refers to a promoter that is transcriptionally active during most, but not necessarily all, phases of growth and development and under most environmental conditions, in at least one cell, tissue or organ. Table 2 below gives examples of constitutive promoters.

TABLE 2
Examples of constitutive promoters

| Gene Source | Reference |
|---|---|
| Actin | McElroy et al, Plant Cell, 2: 163-171, 1990 |
| HMGP | WO 2004/070039 |
| CAMV 35S | Odell et al, Nature, 313: 810-812, 1985 |
| CaMV 19S | Nilsson et al., Physiol. Plant. 100: 456-462, 1997 |
| GOS2 | de Pater et al, Plant J Nov; 2(6): 837-44, 1992, WO |
| | 2004/065596 |
| Ubiquitin | Christensen et al, Plant Mol. Biol. 18: 675-689, 1992 |
| Rice cyclophilin | Buchholz et al, Plant Mol Biol. 25(5): 837-43, 1994 |
| Maize H3 histone | Lepetit et al, Mol. Gen. Genet. 231: 276-285, 1992 |
| Alfalfa H3 | Wu et al. Plant Mol. Biol. 11: 641-649, 1988 |
| histone | |
| Actin 2 | An et al, Plant J. 10(1); 107-121, 1996 |
| 34S FMV | Sanger et al., Plant. Mol. Biol., 14, 1990: 433-443 |
| Rubisco small | U.S. Pat. No. 4,962,028 |
| subunit | |
| OCS | Leisner (1988) Proc Natl Acad Sci USA 85(5): 2553 |
| SAD1 | Jain et al., Crop Science, 39 (6), 1999: 1696 |
| SAD2 | Jain et al., Crop Science, 39 (6), 1999: 1696 |
| nos | Shaw et al. (1984) Nucleic Acids Res. 12(20): |
| | 7831-7846 |
| V-ATPase | WO 01/14572 |
| Super promoter | WO 95/14098 |
| G-box proteins | WO 94/12015 |

### Ubiquitous Promoter

[0077] A ubiquitous promoter is active in substantially all tissues or cells of an organism.

### Developmentally-Regulated Promoter

[0078] A developmentally-regulated promoter is active during certain developmental stages or in parts of the plant that undergo developmental changes.

### Inducible Promoter

[0079] An inducible promoter has induced or increased transcription initiation in response to a chemical (for a review see Gatz 1997, Annu. Rev. Plant Physiol. Plant Mol. Biol., 48:89-108), environmental or physical stimulus, or may be “stress-inducible”, i.e. activated when a plant is exposed to various stress conditions, or a “pathogen-inducible” i.e. activated when a plant is exposed to exposure to various pathogens.

### Organ-Specific/Tissue-Specific Promoter

[0080] An organ-specific or tissue-specific promoter is one that is capable of preferentially initiating transcription in certain organs or tissues, such as the leaves, roots, seed tissue etc. For example, a “root-specific promoter” is a promoter that is transcriptionally active predominantly in plant roots, substantially to the exclusion of any other parts of a plant, whilst still allowing for any leaky expression in these other plant parts. Promoters able to initiate transcription in certain cells only are referred to herein as “cell-specific”.

[0081] Examples of root-specific promoters are listed in Table i below:

TABLE I
Examples of root-specific promoters

| Gene Source | Reference |
|---|---|
| Rice RCc3 | Xu et al (1995) Plant Mol Biol 27(2): 237-48 |
| Arabidopsis phosphate | Kovama et al., 2005 |
| transporter PHT1 | |
| Medicago phosphate | Xiao et al., 2006 |
| transporter | |
| Arabidopsis Pyk10 | Nitz et al. (2001) Plant Sci 161(2): 337-346 |
| Tobacco root-specific | Conkling et al. (1990) Plant Phys 93(3): |
| genes RB7, RD2, | 1203-1211 |
| RD5, RH12 | |
| Barley root-specific | Lerner & Raikhel (1989) Plant Phys 91: 124-129 |
| lectin | |
| Root-specific hydroxy- | Keller & Lamb (1989) Genes & Dev 3: |
| proline rich protein | 1639-1646 |
| Arabidopsis CDC27B/ | Blilou et al. (2002) Genes & Dev 16: 2566-2575 |
| hobbit | |

[0082] A seed-specific promoter is transcriptionally active predominantly in seed tissue, but not necessarily exclusively in seed tissue (in cases of leaky expression). The seed-specific promoter may be active during seed development and/or during germination. Examples of seed-specific promoters are given in Qing Qu and Takaiwa (Plant Biotechnol. J. 2, 113-125, 2004), which disclosure is incorporated by reference herein as if fully set forth and in Table ii below.

TABLE II
Examples of seed-specific promoters

| Gene source | Reference |
|---|---|
| seed-specific genes | Simon et al., Plant Mol. Biol. 5: 191, 1985; |
| | Scofield et al., J. Biol. Chem. 262: 12202, 1987.; |
| | Baszczynski et al., Plant Mol. Biol. 14: 633, 1990. |
| Brazil Nut albumin | Pearson et al., Plant Mol. Biol. 18: 235-245, 1992. |
| Legumin | Ellis et al., Plant Mol. Biol. 10: 203-214, 1988. |
| glutelin (rice) | Takaiwa et al., Mol. Gen. Genet. 208: 15-22, 1986; |
| | Takaiwa et al., FEBS Letts. 221: 43-47, 1987. |
| Zein | Matzke et al Plant Mol Biol, 14(3): 323-32 1990 |
| NapA | Stalberg et al, Planta 199: 515-519, 1996. |
| Wheat LMW and HMW glutenin-1 | Mol Gen Genet 216: 81-90, 1989; NAR 17: 461-2, 1989 |
| Wheat SPA | Albani et al, Plant Cell, 9: 171-184, 1997 |
| Wheat α, β, γ-gliadins | EMBO J. 3: 1409-15, 1984 |
| Barley ltr1 promoter | Diaz et al. (1995) Mol Gen Genet 248(5): 592-8 |
| Barley B1, C, D, hordein | Theor Appl Gen 98: 1253-62, 1999; Plant J 4: 343-55, |
| | 1993; Mol Gen Genet 250: 750-60, 1996 |
| Barley DOF | Mena et al, The Plant Journal, 116(1): 53-62, 1998 |
| blz2 | EP99106056.7 |
| Synthetic promoter | Vicente-Carbajosa et al., Plant J. 13: 629-640, 1998. |
| rice prolamin NRP33 | Wu et al, Plant Cell Physiology 39(8) 885-889, 1998 |
| rice a-globulin Glb-1 | Wu et al, Plant Cell Physiology 39(8) 885-889, 1998 |
| rice OSH1 | Sato et al, Proc. Natl. Acad. Sci. USA, 93: 8117-8122, |
| | 1996 |
| rice α-globulin REB/OHP-1 | Nakase et al. Plant Mol. Biol. 33: 513-522, 1997 |
| rice ADP-glucose pyrophosphorylase | Trans Res 6: 157-68, 1997 |
| Maize ESR gene family | Plant J 12: 235-46, 1997 |
| Sorghum α-kafirin | DeRose et al., Plant Mol. Biol 32: 1029-35, 1996 |
| KNOX | Postma-Haarsma et al, Plant Mol. Biol. 39: 257-71, 1999 |
| rice oleosin | Wu et al, J. Biochem. 123: 386, 1998 |
| sunflower oleosin | Cummins et al., Plant Mol. Biol. 19: 873-876, 1992 |
| PRO0117, putative rice 40S | WO 2004/070039 |
| ribosomal protein | |
| PRO0136, rice alanine | Unpublished |
| aminotransferase | |
| PRO0147, trypsin inhibitor ITR1 | Unpublished |
| (barley) | |
| PRO0151, rice WSI18 | WO 2004/070039 |
| PRO0175, rice RAB21 | WO 2004/070039 |
| PRO005 | WO 2004/070039 |
| PRO0095 | WO 2004/070039 |
| α-amylase (Amy32b) | Lanahan et al, Plant Cell 4: 203-211, 1992; Skriver et al, |
| | Proc Natl Acad Sci USA 88: 7266-7270, 1991 |
| Cathepsin β-like gene | Cejudo et al, Plant Mol Biol 20: 849-856, 1992 |
| Barley Ltp2 | Kalla et al., Plant J. 6: 849-60, 1994 |
| Chi26 | Leah et al., Plant J. 4: 579-89, 1994 |
| Maize B-Peru | Selinger et al., Genetics 149; 1125-38, 1998 |

[0083] A green tissue-specific promoter as defined herein is a promoter that is transcriptionally active predominantly in green tissue, substantially to the exclusion of any other parts of a plant, whilst still allowing for any leaky expression in these other plant parts. Examples of green tissue-specific promoters which may be used to perform the methods of the invention are shown in Table iii below.

TABLE III
Examples of green tissue-specific promoters

| Gene | Expression | Reference |
|---|---|---|
| Maize Orthophosphate dikinase | Leaf specific | Fukavama et al., 2001 |
| Maize Phosphoenolpyruvate | Leaf specific | Kausch et al., 2001 |
| carboxylase | | |
| Rice Phosphoenolpyruvate | Leaf specific | Liu et al., 2003 |
| carboxylase | | |
| Rice small subunit Rubisco | Leaf specific | Nomura et al., 2000 |
| rice beta expansin EXBP9 | Shoot | WO 2004/070039 |
| | specific | |
| Pigeonpea small subunit Rubisco | Leaf specific | Panguluri et al., 2005 |
| Pea RBCS3A | Leaf specific | |

[0084] Another example of a tissue-specific promoter is a meristem-specific promoter, which is transcriptionally active predominantly in meristematic tissue, substantially to the exclusion of any other parts of a plant, whilst still allowing for any leaky expression in these other plant parts. Examples of meristem-specific promoters which may be used to perform the methods of the invention are shown in Table iv below.

TABLE IV
Examples of meristem-specific promoters

| Gene source | Expression pattern | Reference |
|---|---|---|
| rice OSH1 | Shoot apical meristem, from | Sato et al. (1996) |
| | embryo globular stage to | Proc. Natl. Acad. |
| | seedling stage | Sci. USA, 93: |
| | | 8117-8122 |
| Rice metallothionein | Meristem specific | BAD87835.1 |
| WAK1 & WAK 2 | Shoot and root apical | Wagner & Kohorn |
| | meristems, and in expanding | (2001) Plant Cell |
| | leaves and sepals | 13(2): 303-318 |

### Terminator

[0085] The term “terminator” encompasses a control sequence which is a DNA sequence at the end of a transcriptional unit which signals 3′ processing and polyadenylation of a primary transcript and termination of transcription. The terminator can be derived from the natural gene, from a variety of other plant genes, or from T-DNA. The terminator to be added may be derived from, for example, the nopaline synthase or octopine synthase genes, or alternatively from another plant gene, or less preferably from any other eukaryotic gene.

### Modulation

[0086] The term “modulation” means in relation to expression or gene expression, a process in which the expression level is changed by said gene expression in comparison to the control plant, the expression level may be increased or decreased. The original, unmodulated expression may be of any kind of expression of a structural RNA (rRNA, tRNA) or mRNA with subsequent translation. The term “modulating the activity” shall mean any change of the expression of the inventive nucleic acid sequences or encoded proteins, which leads to increased yield and/or increased growth of the plants.

[0087] Expression

[0088] The term “expression” or “gene expression” means the transcription of a specific gene or specific genes or specific genetic construct. The term “expression” or “gene expression” in particular means the transcription of a gene or genes or genetic construct into structural RNA (rRNA, tRNA) or mRNA with or without subsequent translation of the latter into a protein. The process includes transcription of DNA and processing of the resulting mRNA product.

### Increased Expression/Overexpression

[0089] The term “increased expression” or “overexpression” as used herein means any form of expression that is additional to the original wild-type expression level.

[0090] Methods for increasing expression of genes or gene products are well documented in the art and include, for example, overexpression driven by appropriate promoters, the use of transcription enhancers or translation enhancers. Isolated nucleic acids which serve as promoter or enhancer elements may be introduced in an appropriate position (typically upstream) of a non-heterologous form of a polynucleotide so as to upregulate expression of a nucleic acid encoding the polypeptide of interest. For example, endogenous promoters may be altered in vivo by mutation, deletion, and/or substitution (see, Kmiec, U.S. Pat. No. 5,565,350; Zarling et al., WO9322443), or isolated promoters may be introduced into a plant cell in the proper orientation and distance from a gene of the present invention so as to control the expression of the gene.

[0091] If polypeptide expression is desired, it is generally desirable to include a polyadenylation region at the 3′-end of a polynucleotide coding region. The polyadenylation region can be derived from the natural gene, from a variety of other plant genes, or from T-DNA. The 3′ end sequence to be added may be derived from, for example, the nopaline synthase or octopine synthase genes, or alternatively from another plant gene, or less preferably from any other eukaryotic gene.

[0092] An intron sequence may also be added to the 5′ untranslated region (UTR) or the coding sequence of the partial coding sequence to increase the amount of the mature message that accumulates in the cytosol. Inclusion of a spliceable intron in the transcription unit in both plant and animal expression constructs has been shown to increase gene expression at both the mRNA and protein levels up to 1000-fold (Buchman and Berg (1988) Mol. Cell biol. 8: 4395-4405; Callis et al. (1987) Genes Dev 1:1183-1200). Such intron enhancement of gene expression is typically greatest when placed near the 5′ end of the transcription unit. Use of the maize introns Adh1-S intron 1, 2, and 6, the Bronze⁻¹ intron are known in the art. For general information see: The Maize Handbook, Chapter 116, Freeling and Walbot, Eds., Springer, N.Y. (1994).

### Endogenous Gene

[0093] Reference herein to an “endogenous” gene not only refers to the gene in question as found in a plant in its natural form (i.e., without there being any human intervention), but also refers to that same gene (or a substantially homologous nucleic acid/gene) in an isolated form subsequently (re)introduced into a plant (a transgene). For example, a transgenic plant containing such a transgene may encounter a substantial reduction of the transgene expression and/or substantial reduction of expression of the endogenous gene. The isolated gene may be isolated from an organism or may be manmade, for example by chemical synthesis.

### Decreased Expression

[0094] Reference herein to “decreased epression” or “reduction or substantial elimination” of expression is taken to mean a decrease in endogenous gene expression and/or polypeptide levels and/or polypeptide activity relative to control plants. The reduction or substantial elimination is in increasing order of preference at least 10%, 20%, 30%, 40% or 50%, 60%, 70%, 80%, 85%, 90%, or 95%, 96%, 97%, 98%, 99% or more reduced compared to that of control plants.

[0095] For the reduction or substantial elimination of expression an endogenous gene in a plant, a sufficient length of substantially contiguous nucleotides of a nucleic acid sequence is required. In order to perform gene silencing, this may be as little as 20, 19, 18, 17, 16, 15, 14, 13, 12, 11, 10 or fewer nucleotides, alternatively this may be as much as the entire gene (including the 5′ and/or 3′ UTR, either in part or in whole). The stretch of substantially contiguous nucleotides may be derived from the nucleic acid encoding the Patellin, or the Precursor RNA Processing factor 38, or the Adaptor 2, or a WDR23-like polypeptide (target genes), or from any nucleic acid capable of encoding an orthologue, paralogue or homologue of the Patellin, or the Precursor RNA Processing factor 38, or the Adaptor 2, or a WDR23-like polypeptide. Preferably, the stretch of substantially contiguous nucleotides is capable of forming hydrogen bonds with the target gene (either sense or antisense strand), more preferably, the stretch of substantially contiguous nucleotides has, in increasing order of preference, 50%, 60%, 70%, 80%, 85%, 90%, 95%, 96%, 97%, 98%, 99%, 100% sequence identity to the target gene (either sense or antisense strand). A nucleic acid sequence encoding a (functional) polypeptide is not a requirement for the various methods discussed herein for the reduction or substantial elimination of expression of an endogenous gene.

[0096] Examples of various methods for the reduction or substantial elimination of expression in a plant of an endogenous gene, or for lowering levels and/or activity of a protein, are known to the skilled in the art. A skilled person would readily be able to adapt the known methods for silencing, so as to achieve reduction of expression of an endogenous gene in a whole plant or in parts thereof through the use of an appropriate promoter, for example.

[0097] This reduction or substantial elimination of expression may be achieved using routine tools and techniques. A preferred method for the reduction or substantial elimination of endogenous gene expression is by introducing and expressing in a plant a genetic construct into which the nucleic acid (in this case a stretch of substantially contiguous nucleotides derived from the gene of interest, or from any nucleic acid capable of encoding an orthologue, paralogue or homologue of any one of the Patellin, or the Precursor RNA Processing factor 38, or the Adaptor 2, or a WDR23-like polypeptide) is cloned as an inverted repeat (in part or completely), separated by a spacer (non-coding DNA).

[0098] Another method for the reduction or substantial elimination of endogenous gene expression is by RNA-mediated silencing using an inverted repeat of a nucleic acid sequence or a part thereof (in this case a stretch of substantially contiguous nucleotides derived from the gene of interest, or from any nucleic acid sequence capable of encoding an orthologue, paralogue or homologue of the Patellin, or the Precursor RNA Processing factor 38, or the Adaptor 2, or a WDR23-like polypeptide), preferably capable of forming a hairpin structure. Another example of an RNA silencing method involves the introduction of nucleic acid sequences or parts thereof (in this case a stretch of substantially contiguous nucleotides derived from the gene of interest, or from any nucleic acid sequence capable of encoding an orthologue, paralogue or homologue of the Patellin, or the Precursor RNA Processing factor 38, or the Adaptor 2, or a WDR23-like polypeptide) in a sense orientation into a plant. Another example of an RNA silencing method involves the use of antisense nucleic acid sequences. Gene silencing may also be achieved by insertion mutagenesis (for example, T-DNA insertion or transposon insertion) or by strategies as described by, among others, Angell and Baulcombe ((1999) Plant J 20(3): 357-62), (Amplicon VIGS WO 98/36083), or Baulcombe (WO 99/15682). Other methods, such as the use of antibodies directed to an endogenous polypeptide for inhibiting its function in planta, or interference in the signalling pathway in which a polypeptide is involved, will be well known to the skilled man. Artificial and/or natural microRNAs (miRNAs) may be used to knock out gene expression and/or mRNA translation. Endogenous miRNAs are single stranded small RNAs of typically 19-24 nucleotides long. Artificial microRNAs (amiRNAs), which are typically 21 nucleotides in length, can be genetically engineered specifically to negatively regulate gene expression of single or multiple genes of interest. Determinants of plant microRNA target selection are well known in the art. Empirical parameters for target recognition have been defined and can be used to aid in the design of specific amiRNAs (Schwab et al., (2005) Dev Cell 8(4):517-27). Convenient tools for design and generation of amiRNAs and their precursors are also available to the public (Schwab et al., (2006) Plant Cell 18(5):1121-33).

[0099] In such a preferred method, expression of the endogenous gene is reduced or substantially eliminated through RNA-mediated silencing using an inverted repeat of a nucleic acid or a part thereof (in this case a stretch of substantially contiguous nucleotides derived from the gene of interest, or from any nucleic acid capable of encoding an orthologue, paralogue or homologue of the Patellin, or the Precursor RNA Processing factor 38, or the Adaptor 2, or a WDR23-like polypeptide), preferably capable of forming a hairpin structure. The inverted repeat is cloned in an expression vector comprising control sequences. A non-coding DNA nucleic acid sequence (a spacer, for example a matrix attachment region fragment (MAR), an intron, a polylinker, etc.) is located between the two inverted nucleic acids forming the inverted repeat. After transcription of the inverted repeat, a chimeric RNA with a self-complementary structure is formed (partial or complete). This double-stranded RNA structure is referred to as the hairpin RNA (hpRNA). The hpRNA is processed by the plant into siRNAs that are incorporated into an RNA-induced silencing complex (RISC). The RISC further cleaves the mRNA transcripts, thereby substantially reducing the number of mRNA transcripts to be translated into polypeptides. For further general details see for example, Grierson et al. (1998) WO 98/53083; Waterhouse et al. (1999) WO 99/53050).

[0100] Performance of the methods of the invention does not rely on introducing and expressing in a plant a genetic construct into which the nucleic acid is cloned as an inverted repeat, but any one or more of several well-known “gene silencing” methods may be used to achieve the same effects.

[0101] One such method for the reduction of endogenous gene expression is RNA-mediated silencing of gene expression (downregulation). Silencing in this case is triggered in a plant by a double stranded RNA sequence (dsRNA) that is substantially similar to the target endogenous gene. This dsRNA is further processed by the plant into about 20 to about 26 nucleotides called short interfering RNAs (siRNAs). The siRNAs are incorporated into an RNA-induced silencing complex (RISC) that cleaves the mRNA transcript of the endogenous target gene, thereby substantially reducing the number of mRNA transcripts to be translated into a polypeptide. Preferably, the double stranded RNA sequence corresponds to a target gene.

[0102] Another example of an RNA silencing method involves the introduction of nucleic acid sequences or parts thereof (in this case a stretch of substantially contiguous nucleotides derived from the gene of interest, or from any nucleic acid capable of encoding an orthologue, paralogue or homologue of the Patellin, or the Precursor RNA Processing factor 38, or the Adaptor 2) in a sense orientation into a plant. “Sense orientation” refers to a DNA sequence that is homologous to an mRNA transcript thereof. Introduced into a plant would therefore be at least one copy of the nucleic acid sequence. The additional nucleic acid sequence will reduce expression of the endogenous gene, giving rise to a phenomenon known as co-suppression. The reduction of gene expression will be more pronounced if several additional copies of a nucleic acid sequence are introduced into the plant, as there is a positive correlation between high transcript levels and the triggering of co-suppression.

[0103] Another example of an RNA silencing method involves the use of antisense nucleic acid sequences. An “antisense” nucleic acid sequence comprises a nucleotide sequence that is complementary to a “sense” nucleic acid sequence encoding a protein, i.e. complementary to the coding strand of a double-stranded cDNA molecule or complementary to an mRNA transcript sequence. The antisense nucleic acid sequence is preferably complementary to the endogenous gene to be silenced. The complementarity may be located in the “coding region” and/or in the “non-coding region” of a gene. The term “coding region” refers to a region of the nucleotide sequence comprising codons that are translated into amino acid residues. The term “non-coding region” refers to 5′ and 3′ sequences that flank the coding region that are transcribed but not translated into amino acids (also referred to as 5′ and 3′ untranslated regions).

[0104] Antisense nucleic acid sequences can be designed according to the rules of Watson and Crick base pairing. The antisense nucleic acid sequence may be complementary to the entire nucleic acid sequence (in this case a stretch of substantially contiguous nucleotides derived from the gene of interest, or from any nucleic acid capable of encoding an orthologue, paralogue or homologue of the Patellin, or the Precursor RNA Processing factor 38, or the Adaptor 2), but may also be an oligonucleotide that is antisense to only a part of the nucleic acid sequence (including the mRNA 5′ and 3′ UTR). For example, the antisense oligonucleotide sequence may be complementary to the region surrounding the translation start site of an mRNA transcript encoding a polypeptide. The length of a suitable antisense oligonucleotide sequence is known in the art and may start from about 50, 45, 40, 35, 30, 25, 20, 15 or 10 nucleotides in length or less. An antisense nucleic acid sequence according to the invention may be constructed using chemical synthesis and enzymatic ligation reactions using methods known in the art. For example, an antisense nucleic acid sequence (e.g., an antisense oligonucleotide sequence) may be chemically synthesized using naturally occurring nucleotides or variously modified nucleotides designed to increase the biological stability of the molecules or to increase the physical stability of the duplex formed between the antisense and sense nucleic acid sequences, e.g., phosphorothioate derivatives and acridine substituted nucleotides may be used. Examples of modified nucleotides that may be used to generate the antisense nucleic acid sequences are well known in the art. Known nucleotide modifications include methylation, cyclization and ‘caps’ and substitution of one or more of the naturally occurring nucleotides with an analogue such as inosine. Other modifications of nucleotides are well known in the art.

[0105] The antisense nucleic acid sequence can be produced biologically using an expression vector into which a nucleic acid sequence has been subcloned in an antisense orientation (i.e., RNA transcribed from the inserted nucleic acid will be of an antisense orientation to a target nucleic acid of interest). Preferably, production of antisense nucleic acid sequences in plants occurs by means of a stably integrated nucleic acid construct comprising a promoter, an operably linked antisense oligonucleotide, and a terminator.

[0106] The nucleic acid molecules used for silencing in the methods of the invention (whether introduced into a plant or generated in situ) hybridize with or bind to mRNA transcripts and/or genomic DNA encoding a polypeptide to thereby inhibit expression of the protein, e.g., by inhibiting transcription and/or translation. The hybridization can be by conventional nucleotide complementarity to form a stable duplex, or, for example, in the case of an antisense nucleic acid sequence which binds to DNA duplexes, through specific interactions in the major groove of the double helix. Antisense nucleic acid sequences may be introduced into a plant by transformation or direct injection at a specific tissue site. Alternatively, antisense nucleic acid sequences can be modified to target selected cells and then administered systemically. For example, for systemic administration, antisense nucleic acid sequences can be modified such that they specifically bind to receptors or antigens expressed on a selected cell surface, e.g., by linking the antisense nucleic acid sequence to peptides or antibodies which bind to cell surface receptors or antigens. The antisense nucleic acid sequences can also be delivered to cells using the vectors described herein.

[0107] According to a further aspect, the antisense nucleic acid sequence is an a-anomeric nucleic acid sequence. An a-anomeric nucleic acid sequence forms specific double-stranded hybrids with complementary RNA in which, contrary to the usual b-units, the strands run parallel to each other (Gaultier et al. (1987) Nucl Ac Res 15: 6625-6641). The antisense nucleic acid sequence may also comprise a 2′-o-methylribonucleotide (Inoue et al. (1987) Nucl Ac Res 15, 6131-6148) or a chimeric RNA-DNA analogue (Inoue et al. (1987) FEBS Lett. 215, 327-330).

[0108] The reduction or substantial elimination of endogenous gene expression may also be performed using ribozymes. Ribozymes are catalytic RNA molecules with ribonuclease activity that are capable of cleaving a single-stranded nucleic acid sequence, such as an mRNA, to which they have a complementary region. Thus, ribozymes (e.g., hammerhead ribozymes (described in Haselhoff and Gerlach (1988) Nature 334, 585-591) can be used to catalytically cleave mRNA transcripts encoding a polypeptide, thereby substantially reducing the number of mRNA transcripts to be translated into a polypeptide. A ribozyme having specificity for a nucleic acid sequence can be designed (see for example: Cech et al. U.S. Pat. No. 4,987,071; and Cech et al. U.S. Pat. No. 5,116,742). Alternatively, mRNA transcripts corresponding to a nucleic acid sequence can be used to select a catalytic RNA having a specific ribonuclease activity from a pool of RNA molecules (Bartel and Szostak (1993) Science 261, 1411-1418). The use of ribozymes for gene silencing in plants is known in the art (e.g., Atkins et al. (1994) WO 94/00012; Lenne et al. (1995) WO 95/03404; Lutziger et al. (2000) WO 00/00619; Prinsen et al. (1997) WO 97/13865 and Scott et al. (1997) WO 97/38116).

[0109] Gene silencing may also be achieved by insertion mutagenesis (for example, T-DNA insertion or transposon insertion) or by strategies as described by, among others, Angell and Baulcombe ((1999) Plant J 20(3): 357-62), (Amplicon VIGS WO 98/36083), or Baulcombe (WO 99/15682).

[0110] Gene silencing may also occur if there is a mutation on an endogenous gene and/or a mutation on an isolated gene/nucleic acid subsequently introduced into a plant. The reduction or substantial elimination may be caused by a non-functional polypeptide. For example, the polypeptide may bind to various interacting proteins; one or more mutation(s) and/or truncation(s) may therefore provide for a polypeptide that is still able to bind interacting proteins (such as receptor proteins) but that cannot exhibit its normal function (such as signalling ligand).

[0111] A further approach to gene silencing is by targeting nucleic acid sequences complementary to the regulatory region of the gene (e.g., the promoter and/or enhancers) to form triple helical structures that prevent transcription of the gene in target cells. See Helene, C., Anticancer Drug Res. 6, 569-84, 1991; Helene et al., Ann. N.Y. Acad. Sci. 660, 27-36 1992; and Maher, L.J. Bioassays 14, 807-15, 1992.

[0112] Other methods, such as the use of antibodies directed to an endogenous polypeptide for inhibiting its function in planta, or interference in the signalling pathway in which a polypeptide is involved, will be well known to the skilled man. In particular, it can be envisaged that manmade molecules may be useful for inhibiting the biological function of a target polypeptide, or for interfering with the signalling pathway in which the target polypeptide is involved.

[0113] Alternatively, a screening program may be set up to identify in a plant population natural variants of a gene, which variants encode polypeptides with reduced activity. Such natural variants may also be used for example, to perform homologous recombination.

[0114] Artificial and/or natural microRNAs (miRNAs) may be used to knock out gene expression and/or mRNA translation. Endogenous miRNAs are single stranded small RNAs of typically 19-24 nucleotides long. They function primarily to regulate gene expression and/or mRNA translation. Most plant microRNAs (miRNAs) have perfect or near-perfect complementarity with their target sequences. However, there are natural targets with up to five mismatches. They are processed from longer non-coding RNAs with characteristic fold-back structures by double-strand specific RNases of the Dicer family. Upon processing, they are incorporated in the RNA-induced silencing complex (RISC) by binding to its main component, an Argonaute protein. MiRNAs serve as the specificity components of RISC, since they base-pair to target nucleic acids, mostly mRNAs, in the cytoplasm. Subsequent regulatory events include target mRNA cleavage and destruction and/or translational inhibition. Effects of miRNA overexpression are thus often reflected in decreased mRNA levels of target genes.

[0115] Artificial microRNAs (amiRNAs), which are typically 21 nucleotides in length, can be genetically engineered specifically to negatively regulate gene expression of single or multiple genes of interest. Determinants of plant microRNA target selection are well known in the art. Empirical parameters for target recognition have been defined and can be used to aid in the design of specific amiRNAs, (Schwab et al., Dev. Cell 8, 517-527, 2005). Convenient tools for design and generation of amiRNAs and their precursors are also available to the public (Schwab et al., Plant Cell 18, 1121-1133, 2006).

[0116] For optimal performance, the gene silencing techniques used for reducing expression in a plant of an endogenous gene requires the use of nucleic acid sequences from monocotyledonous plants for transformation of monocotyledonous plants, and from dicotyledonous plants for transformation of dicotyledonous plants. Preferably, a nucleic acid sequence from any given plant species is introduced into that same species. For example, a nucleic acid sequence from rice is transformed into a rice plant. However, it is not an absolute requirement that the nucleic acid sequence to be introduced originates from the same plant species as the plant in which it will be introduced. It is sufficient that there is substantial homology between the endogenous target gene and the nucleic acid to be introduced.

[0117] Described above are examples of various methods for the reduction or substantial elimination of expression in a plant of an endogenous gene. A person skilled in the art would readily be able to adapt the aforementioned methods for silencing so as to achieve reduction of expression of an endogenous gene in a whole plant or in parts thereof through the use of an appropriate promoter, for example.

### Selectable Marker (Gene)/Reporter Gene

[0118] “Selectable marker”, “selectable marker gene” or “reporter gene” includes any gene that confers a phenotype on a cell in which it is expressed to facilitate the identification and/or selection of cells that are transfected or transformed with a nucleic acid construct of the invention. These marker genes enable the identification of a successful transfer of the nucleic acid molecules via a series of different principles. Suitable markers may be selected from markers that confer antibiotic or herbicide resistance, that introduce a new metabolic trait or that allow visual selection. Examples of selectable marker genes include genes conferring resistance to antibiotics (such as nptII that phosphorylates neomycin and kanamycin, or hpt, phosphorylating hygromycin, or genes conferring resistance to, for example, bleomycin, streptomycin, tetracyclin, chloramphenicol, ampicillin, gentamycin, geneticin (G418), spectinomycin or blasticidin), to herbicides (for example bar which provides resistance to Basta®; aroA or gox providing resistance against glyphosate, or the genes conferring resistance to, for example, imidazolinone, phosphinothricin or sulfonylurea), or genes that provide a metabolic trait (such as manA that allows plants to use mannose as sole carbon source or xylose isomerase for the utilisation of xylose, or antinutritive markers such as the resistance to 2-deoxyglucose). Expression of visual marker genes results in the formation of colour (for example β-glucuronidase, GUS or β-galactosidase with its coloured substrates, for example X-Gal), luminescence (such as the luciferin/luceferase system) or fluorescence (Green Fluorescent Protein, GFP, and derivatives thereof). This list represents only a small number of possible markers. The skilled worker is familiar with such markers. Different markers are preferred, depending on the organism and the selection method.

[0119] It is known that upon stable or transient integration of nucleic acids into plant cells, only a minority of the cells takes up the foreign DNA and, if desired, integrates it into its genome, depending on the expression vector used and the transfection technique used. To identify and select these integrants, a gene coding for a selectable marker (such as the ones described above) is usually introduced into the host cells together with the gene of interest. These markers can for example be used in mutants in which these genes are not functional by, for example, deletion by conventional methods. Furthermore, nucleic acid molecules encoding a selectable marker can be introduced into a host cell on the same vector that comprises the sequence encoding the polypeptides of the invention or used in the methods of the invention, or else in a separate vector. Cells which have been stably transfected with the introduced nucleic acid can be identified for example by selection (for example, cells which have integrated the selectable marker survive whereas the other cells die). The marker genes may be removed or excised from the transgenic cell once they are no longer needed. Techniques for marker gene removal are known in the art, useful techniques are described above in the definitions section.

[0120] Since the marker genes, particularly genes for resistance to antibiotics and herbicides, are no longer required or are undesired in the transgenic host cell once the nucleic acids have been introduced successfully, the process according to the invention for introducing the nucleic acids advantageously employs techniques which enable the removal or excision of these marker genes. One such a method is what is known as co-transformation. The co-transformation method employs two vectors simultaneously for the transformation, one vector bearing the nucleic acid according to the invention and a second bearing the marker gene(s). A large proportion of transformants receives or, in the case of plants, comprises (up to 40% or more of the transformants), both vectors. In case of transformation with Agrobacteria, the transformants usually receive only a part of the vector, i.e. the sequence flanked by the T-DNA, which usually represents the expression cassette. The marker genes can subsequently be removed from the transformed plant by performing crosses. In another method, marker genes integrated into a transposon are used for the transformation together with desired nucleic acid (known as the Ac/Ds technology). The transformants can be crossed with a transposase source or the transformants are transformed with a nucleic acid construct conferring expression of a transposase, transiently or stable. In some cases (approx. 10%), the transposon jumps out of the genome of the host cell once transformation has taken place successfully and is lost. In a further number of cases, the transposon jumps to a different location. In these cases the marker gene must be eliminated by performing crosses. In microbiology, techniques were developed which make possible, or facilitate, the detection of such events. A further advantageous method relies on what is known as recombination systems; whose advantage is that elimination by crossing can be dispensed with. The best-known system of this type is what is known as the Cre/lox system. Crel is a recombinase that removes the sequences located between the loxP sequences. If the marker gene is integrated between the loxP sequences, it is removed once transformation has taken place successfully, by expression of the recombinase. Further recombination systems are the HIN/HIX, FLP/FRT and REP/STB system (Tribble et al., J. Biol. Chem., 275, 2000: 22255-22267; Velmurugan et al., J. Cell Biol., 149, 2000: 553-566). A site-specific integration into the plant genome of the nucleic acid sequences according to the invention is possible. Naturally, these methods can also be applied to microorganisms such as yeast, fungi or bacteria.

### Transgenic/Transgene/Recombinant

[0121] For the purposes of the invention, “transgenic”, “transgene” or “recombinant” means with regard to, for example, a nucleic acid sequence, an expression cassette, gene construct or a vector comprising the nucleic acid sequence or an organism transformed with the nucleic acid sequences, expression cassettes or vectors according to the invention, all those constructions brought about by recombinant methods in which either
[0122] (a) the nucleic acid sequences encoding proteins useful in the methods of the invention, or
[0123] (b) genetic control sequence(s) which is operably linked with the nucleic acid sequence according to the invention, for example a promoter, or
[0124] (c) a) and b)
   are not located in their natural genetic environment or have been modified by recombinant methods, it being possible for the modification to take the form of, for example, a substitution, addition, deletion, inversion or insertion of one or more nucleotide residues. The natural genetic environment is understood as meaning the natural genomic or chromosomal locus in the original plant or the presence in a genomic library. In the case of a genomic library, the natural genetic environment of the nucleic acid sequence is preferably retained, at least in part. The environment flanks the nucleic acid sequence at least on one side and has a sequence length of at least 50 bp, preferably at least 500 bp, especially preferably at least 1000 bp, most preferably at least 5000 bp. A naturally occurring expression cassette—for example the naturally occurring combination of the natural promoter of the nucleic acid sequences with the corresponding nucleic acid sequence encoding a polypeptide useful in the methods of the present invention, as defined above—becomes a transgenic expression cassette when this expression cassette is modified by non-natural, synthetic (“artificial”) methods such as, for example, mutagenic treatment. Suitable methods are described, for example, in U.S. Pat. No. 5,565,350 or WO 00/15815.

[0125] A transgenic plant for the purposes of the invention is thus understood as meaning, as above, that the nucleic acids used in the method of the invention are not at their natural locus in the genome of said plant, it being possible for the nucleic acids to be expressed homologously or heterologously. However, as mentioned, transgenic also means that, while the nucleic acids according to the invention or used in the inventive method are at their natural position in the genome of a plant, the sequence has been modified with regard to the natural sequence, and/or that the regulatory sequences of the natural sequences have been modified. Transgenic is preferably understood as meaning the expression of the nucleic acids according to the invention at an unnatural locus in the genome, i.e. homologous or, preferably, heterologous expression of the nucleic acids takes place. Preferred transgenic plants are mentioned herein.

### Transformation

[0126] The term “introduction” or “transformation” as referred to herein encompasses the transfer of an exogenous polynucleotide into a host cell, irrespective of the method used for transfer. Plant tissue capable of subsequent clonal propagation, whether by organogenesis or embryogenesis, may be transformed with a genetic construct of the present invention and a whole plant regenerated there from. The particular tissue chosen will vary depending on the clonal propagation systems available for, and best suited to, the particular species being transformed. Exemplary tissue targets include leaf disks, pollen, embryos, cotyledons, hypocotyls, megagametophytes, callus tissue, existing meristematic tissue (e.g., apical meristem, axillary buds, and root meristems), and induced meristem tissue (e.g., cotyledon meristem and hypocotyl meristem). The polynucleotide may be transiently or stably introduced into a host cell and may be maintained non-integrated, for example, as a plasmid. Alternatively, it may be integrated into the host genome. The resulting transformed plant cell may then be used to regenerate a transformed plant in a manner known to persons skilled in the art.

[0127] The transfer of foreign genes into the genome of a plant is called transformation. Transformation of plant species is now a fairly routine technique. Advantageously, any of several transformation methods may be used to introduce the gene of interest into a suitable ancestor cell. The methods described for the transformation and regeneration of plants from plant tissues or plant cells may be utilized for transient or for stable transformation. Transformation methods include the use of liposomes, electroporation, chemicals that increase free DNA uptake, injection of the DNA directly into the plant, particle gun bombardment, transformation using viruses or pollen and microprojection. Methods may be selected from the calcium/polyethylene glycol method for protoplasts (Krens, F. A. et al., (1982) Nature 296, 72-74; Negrutiu I et al. (1987) Plant Mol Biol 8: 363-373); electroporation of protoplasts (Shillito R. D. et al. (1985) Bio/Technol 3, 1099-1102); microinjection into plant material (Crossway A et al., (1986) Mol. Gen Genet 202: 179-185); DNA or RNA-coated particle bombardment (Klein T M et al., (1987) Nature 327: 70) infection with (non-integrative) viruses and the like. Transgenic plants, including transgenic crop plants, are preferably produced via Agrobacterium-mediated transformation. An advantageous transformation method is the transformation in planta. To this end, it is possible, for example, to allow the agrobacteria to act on plant seeds or to inoculate the plant meristem with agrobacteria. It has proved particularly expedient in accordance with the invention to allow a suspension of transformed agrobacteria to act on the intact plant or at least on the flower primordia. The plant is subsequently grown on until the seeds of the treated plant are obtained (Clough and Bent, Plant J. (1998) 16, 735-743). Methods for Agrobacterium-mediated transformation of rice include well known methods for rice transformation, such as those described in any of the following: European patent application EP 1198985 A1, Aldemita and Hodges (Planta 199: 612-617, 1996); Chan et al. (Plant Mol Biol 22 (3): 491-506, 1993), Hiei et al. (Plant J 6 (2): 271-282, 1994), which disclosures are incorporated by reference herein as if fully set forth. In the case of corn transformation, the preferred method is as described in either Ishida et al. (Nat. Biotechnol 14(6): 745-50, 1996) or Frame et al. (Plant Physiol 129(1): 13-22, 2002), which disclosures are incorporated by reference herein as if fully set forth. Said methods are further described by way of example in B. Jenes et al., Techniques for Gene Transfer, in: Transgenic Plants, Vol. 1, Engineering and Utilization, eds. S. D. Kung and R. Wu, Academic Press (1993) 128-143 and in Potrykus Annu. Rev. Plant Physiol. Plant Molec. Biol. 42 (1991) 205-225). The nucleic acids or the construct to be expressed is preferably cloned into a vector, which is suitable for transforming Agrobacterium tumefaciens, for example pBin19 (Bevan et al., Nucl. Acids Res. 12 (1984) 8711). Agrobacteria transformed by such a vector can then be used in known manner for the transformation of plants, such as plants used as a model, like Arabidopsis (Arabidopsis thaliana is within the scope of the present invention not considered as a crop plant), or crop plants such as, by way of example, tobacco plants, for example by immersing bruised leaves or chopped leaves in an agrobacterial solution and then culturing them in suitable media. The transformation of plants by means of Agrobacterium tumefaciens is described, for example, by Höfgen and Willmitzer in Nucl. Acid Res. (1988) 16, 9877 or is known inter alia from F. F. White, Vectors for Gene Transfer in Higher Plants; in Transgenic Plants, Vol. 1, Engineering and Utilization, eds. S. D. Kung and R. Wu, Academic Press, 1993, pp. 15-38.

[0128] In addition to the transformation of somatic cells, which then have to be regenerated into intact plants, it is also possible to transform the cells of plant meristems and in particular those cells which develop into gametes. In this case, the transformed gametes follow the natural plant development, giving rise to transgenic plants. Thus, for example, seeds of Arabidopsis are treated with agrobacteria and seeds are obtained from the developing plants of which a certain proportion is transformed and thus transgenic [Feldman, K A and Marks M D (1987). Mol Gen Genet 208:274-289; Feldmann K (1992). In: C Koncz, N-H Chua and J Shell, eds, Methods in Arabidopsis Research. Word Scientific, Singapore, pp. 274-289]. Alternative methods are based on the repeated removal of the inflorescences and incubation of the excision site in the center of the rosette with transformed agrobacteria, whereby transformed seeds can likewise be obtained at a later point in time (Chang (1994). Plant J. 5: 551-558; Katavic (1994). Mol Gen Genet, 245: 363-370). However, an especially effective method is the vacuum infiltration method with its modifications such as the “floral dip” method. In the case of vacuum infiltration of Arabidopsis, intact plants under reduced pressure are treated with an agrobacterial suspension [Bechthold, N (1993). C R Acad Sci Paris Life Sci, 316: 1194-1199], while in the case of the “floral dip” method the developing floral tissue is incubated briefly with a surfactant-treated agrobacterial suspension [Clough, S J and Bent A F (1998) The Plant J. 16, 735-743]. A certain proportion of transgenic seeds are harvested in both cases, and these seeds can be distinguished from non-transgenic seeds by growing under the above-described selective conditions. In addition the stable transformation of plastids is of advantages because plastids are inherited maternally is most crops reducing or eliminating the risk of transgene flow through pollen. The transformation of the chloroplast genome is generally achieved by a process which has been schematically displayed in Klaus et al., 2004 [Nature Biotechnology 22 (2), 225-229]. Briefly the sequences to be transformed are cloned together with a selectable marker gene between flanking sequences homologous to the chloroplast genome. These homologous flanking sequences direct site specific integration into the plastome. Plastidal transformation has been described for many different plant species and an overview is given in Bock (2001) Transgenic plastids in basic research and plant biotechnology. J Mol Biol. 2001 Sep. 21; 312 (3):425-38 or Maliga, P (2003)

[0129] Progress towards commercialization of plastid transformation technology. Trends Biotechnol. 21, 20-28. Further biotechnological progress has recently been reported in form of marker free plastid transformants, which can be produced by a transient co-integrated maker gene (Klaus et al., 2004, Nature Biotechnology 22(2), 225-229).

### T-DNA Activation Tagging

[0130] T-DNA activation tagging (Hayashi et al. Science (1992) 1350-1353), involves insertion of T-DNA, usually containing a promoter (may also be a translation enhancer or an intron), in the genomic region of the gene of interest or 10 kb up- or downstream of the coding region of a gene in a configuration such that the promoter directs expression of the targeted gene. Typically, regulation of expression of the targeted gene by its natural promoter is disrupted and the gene falls under the control of the newly introduced promoter. The promoter is typically embedded in a T-DNA. This T-DNA is randomly inserted into the plant genome, for example, through Agrobacterium infection and leads to modified expression of genes near the inserted T-DNA. The resulting transgenic plants show dominant phenotypes due to modified expression of genes close to the introduced promoter.

### Tilling

[0131] The term “TILLING” is an abbreviation of “Targeted Induced Local Lesions In Genomes” and refers to a mutagenesis technology useful to generate and/or identify nucleic acids encoding proteins with modified expression and/or activity. TILLING also allows selection of plants carrying such mutant variants. These mutant variants may exhibit modified expression, either in strength or in location or in timing (if the mutations affect the promoter for example). These mutant variants may exhibit higher activity than that exhibited by the gene in its natural form. TILLING combines high-density mutagenesis with high-throughput screening methods. The steps typically followed in TILLING are: (a) EMS mutagenesis (Redei GP and Koncz C (1992)

[0132] In Methods in Arabidopsis Research, Koncz C, Chua N H, Schell J, eds. Singapore, World Scientific Publishing Co, pp. 16-82; Feldmann et al., (1994) In Meyerowitz E M, Somerville CR, eds, Arabidopsis. Cold Spring Harbor Laboratory Press, Cold Spring Harbor, N.Y., pp 137-172; Lightner J and Caspar T (1998) In J Martinez-Zapater, J Salinas, eds, Methods on Molecular Biology, Vol. 82. Humana Press, Totowa, N.J., pp 91-104); (b) DNA preparation and pooling of individuals; (c) PCR amplification of a region of interest; (d) denaturation and annealing to allow formation of heteroduplexes; (e) DHPLC, where the presence of a heteroduplex in a pool is detected as an extra peak in the chromatogram; (f) identification of the mutant individual; and (g) sequencing of the mutant PCR product. Methods for TILLING are well known in the art (McCallum et al., (2000) Nat Biotechnol 18: 455-457; reviewed by Stemple (2004) Nat Rev Genet 5(2): 145-50).

### Homologous Recombination

[0133] Homologous recombination allows introduction in a genome of a selected nucleic acid at a defined selected position. Homologous recombination is a standard technology used routinely in biological sciences for lower organisms such as yeast or the moss Physcomitrella. Methods for performing homologous recombination in plants have been described not only for model plants (Offring a et al. (1990) EMBO J 9(10): 3077-84) but also for crop plants, for example rice (Terada et al. (2002) Nat Biotech 20(10): 1030-4; lida and Terada (2004) Curr Opin Biotech 15(2): 132-8), and approaches exist that are generally applicable regardless of the target organism (Miller et al, Nature Biotechnol. 25, 778-785, 2007).

### Yield

[0134] The term “yield” in general means a measurable produce of economic value, typically related to a specified crop, to an area, and to a period of time. Individual plant parts directly contribute to yield based on their number, size and/or weight, or the actual yield is the yield per square meter for a crop and year, which is determined by dividing total production (includes both harvested and appraised production) by planted square meters. The term “yield” of a plant may relate to vegetative biomass (root and/or shoot biomass), to reproductive organs, and/or to propagules (such as seeds) of that plant.

### Early Vigour

[0135] “Early vigour” refers to active healthy well-balanced growth especially during early stages of plant growth, and may result from increased plant fitness due to, for example, the plants being better adapted to their environment (i.e. optimizing the use of energy resources and partitioning between shoot and root). Plants having early vigour also show increased seedling survival and a better establishment of the crop, which often results in highly uniform fields (with the crop growing in uniform manner, i.e. with the majority of plants reaching the various stages of development at substantially the same time), and often better and higher yield. Therefore, early vigour may be determined by measuring various factors, such as thousand kernel weight, percentage germination, percentage emergence, seedling growth, seedling height, root length, root and shoot biomass and many more.

### Increase/Improve/Enhance

[0136] The terms “increase”, “improve” or “enhance” are interchangeable and shall mean in the sense of the application at least a 3%, 4%, 5%, 6%, 7%, 8%, 9% or 10%, preferably at least 15% or 20%, more preferably 25%, 30%, 35% or 40% more yield and/or growth in comparison to control plants as defined herein.

### Seed Yield

[0137] Increased seed yield may manifest itself as one or more of the following: a) an increase in seed biomass (total seed weight) which may be on an individual seed basis and/or per plant and/or per square meter; b) increased number of flowers per plant; c) increased number of (filled) seeds; d) increased seed filling rate (which is expressed as the ratio between the number of filled seeds divided by the total number of seeds); e) increased harvest index, which is expressed as a ratio of the yield of harvestable parts, such as seeds, divided by the total biomass; f) increased thousand kernel weight (TKW) and g) increased number of primary panicles, which is extrapolated from the number of filled seeds counted and their total weight. An increased TKW may result from an increased seed size and/or seed weight, and may also result from an increase in embryo and/or endosperm size.

[0138] An increase in seed yield may also be manifested as an increase in seed size and/or seed volume. Furthermore, an increase in seed yield may also manifest itself as an increase in seed area and/or seed length and/or seed width and/or seed perimeter. Increased seed yield may also result in modified architecture, or may occur because of modified architecture.

### Greenness Index

[0139] The “greenness index” as used herein is calculated from digital images of plants. For each pixel belonging to the plant object on the image, the ratio of the green value versus the red value (in the RGB model for encoding color) is calculated. The greenness index is expressed as the percentage of pixels for which the green-to-red ratio exceeds a given threshold. Under normal growth conditions, under salt stress growth conditions, and under reduced nutrient availability growth conditions, the greenness index of plants is measured in the last imaging before flowering. In contrast, under drought stress growth conditions, the greenness index of plants is measured in the first imaging after drought.

### Plant

[0140] The term “plant” as used herein encompasses whole plants, ancestors and progeny of the plants and plant parts, including seeds, shoots, stems, leaves, roots (including tubers), flowers, and tissues and organs, wherein each of the aforementioned comprise the gene/nucleic acid of interest. The term “plant” also encompasses plant cells, suspension cultures, callus tissue, embryos, meristematic regions, gametophytes, sporophytes, pollen and microspores, again wherein each of the aforementioned comprises the gene/nucleic acid of interest.

[0141] Plants that are particularly useful in the methods of the invention include all plants which belong to the superfamily Viridiplantae, in particular monocotyledonous and dicotyledonous plants including fodder or forage legumes, ornamental plants, food crops, trees or shrubs selected from the list comprising Acer spp., Actinidia spp., Abelmoschus spp., Agave sisalana, Agropyron spp., Agrostis stolonifera, Allium spp., Amaranthus spp., Ammophila arenaria, Ananas comosus, Annona spp., Apium graveolens, Arachis spp, Artocarpus spp., Asparagus officinalis, Avena spp. (e.g. Avena sativa, Avena fatua, Avena byzantina, Avena fatua var. sativa, Avena hybrida), Averrhoa carambola, Bambusa sp., Benincasa hispida, Bertholletia excelsea, Beta vulgaris, Brassica spp. (e.g. Brassica napus, Brassica rapa ssp. [canola, oilseed rape, turnip rape]), Cadaba farinosa, Camellia sinensis, Canna indica, Cannabis sativa, Capsicum spp., Carex elata, Carica papaya, Carissa macrocarpa, Carya spp., Carthamus tinctorius, Castanea spp., Ceiba pentandra, Cichorium endivia, Cinnamomum spp., Citrullus lanatus, Citrus spp., Cocos spp., Coffea spp., Colocasia esculenta, Cola spp., Corchorus sp., Coriandrum sativum, Corylus spp., Crataegus spp., Crocus sativus, Cucurbita spp., Cucumis spp., Cynara spp., Daucus carota, Desmodium spp., Dimocarpus longan, Dioscorea spp., Diospyros spp., Echinochloa spp., Elaeis (e.g. Elaeis guineensis, Elaeis oleifera), Eleusine coracana, Erianthus sp., Eriobotrya japonica, Eucalyptus sp., Eugenia uniflora, Fagopyrum spp., Fagus spp., Festuca arundinacea, Ficus carica, Fortunella spp., Fragaria spp., Ginkgo biloba, Glycine spp. (e.g. Glycine max, Soja hispida or Soja max), Gossypium hirsutum, Helianthus spp. (e.g. Helianthus annuus), Hemerocallis fulva, Hibiscus spp., Hordeum spp. (e.g. Hordeum vulgare), Ipomoea batatas, Juglans spp., Lactuca sativa, Lathyrus spp., Lens culinaris, Linum usitatissimum, Litchi chinensis, Lotus spp., Luffa acutangula, Lupinus spp., Luzula sylvatica, Lycopersicon spp. (e.g. Lycopersicon esculentum, Lycopersicon lycopersicum, Lycopersicon pyriforme), Macrotyloma spp., Malus spp., Malpighia emarginata, Mammea americana, Mangifera indica, Manihot spp., Manilkara zapota, Medicago sativa, Melilotus spp., Mentha spp., Miscanthus sinensis, Momordica spp., Morus nigra, Musa spp., Nicotiana spp., Olea spp., Opuntia spp., Ornithopus spp., Oryza spp. (e.g. Oryza sativa, Oryza latifolia), Panicum miliaceum, Panicum virgatum, Passiflora edulis, Pastinaca sativa, Pennisetum sp., Persea spp., Petroselinum crispum, Phalaris arundinacea, Phaseolus spp., Phleum pratense, Phoenix spp., Phragmites australis, Physalis spp., Pinus spp., Pistacia vera, Pisum spp., Poa spp., Populus spp., Prosopis spp., Prunus spp., Psidium spp., Punica granatum, Pyrus communis, Quercus spp., Raphanus sativus, Rheum rhabarbarum, Ribes spp., Ricinus communis, Rubus spp., Saccharum spp., Salix sp., Sambucus spp., Secale cereale, Sesamum spp., Sinapis sp., Solanum spp. (e.g. Solanum tuberosum, Solanum integrifolium or Solanum lycopersicum), Sorghum bicolor, Spinacia spp., Syzygium spp., Tagetes spp., Tamarindus indica, Theobroma cacao, Trifolium spp., Triticale sp., Triticosecale rimpaui, Triticum spp. (e.g. Triticum aestivum, Triticum durum, Triticum turgidum, Triticum hybemum, Triticum macha, Triticum sativum or Triticum vulgare), Tropaeolum minus, Tropaeolum majus, Vaccinium spp., Vicia spp., Vigna spp., Viola odorata, Vitis spp., Zea mays, Zizania palustris, Ziziphus spp., amongst others.

### DETAILED DESCRIPTION OF THE INVENTION

[0142] Surprisingly, it has now been found that modulating expression in a plant of a nucleic acid encoding a PATL polypeptide, or a PRP38 polypeptide, or an GATA-like polypeptide, or an ADA2 polypeptide, or a WDR23-like polypeptide gives plants having enhanced yield-related traits relative to control plants. According to a first embodiment, the present invention provides a method for enhancing yield-related traits in plants relative to control plants, comprising modulating expression in a plant of a nucleic acid encoding a PATL polypeptide, or a PRP38 polypeptide, or an GATA-like polypeptide, or an ADA2 polypeptide, or a WDR23-like polypeptide and optionally selecting plants having enhanced yield-related traits.

[0143] In one embodiment, surprisingly, it has now been found that modulating (preferably increasing) expression in a plant of a nucleic acid encoding a GATA-like polypeptide gives plants having increased Thousand Kernel Weight (TKW) relative to control plants. According to a one embodiment, the present invention provides a method for enhancing TKW in plants relative to control plants, comprising modulating (preferably increasing) expression in a plant of a nucleic acid encoding a GATA-like polypeptide.

[0144] In another embodiment, it has now been found that increasing expression in a plant of a nucleic acid sequence encoding a WDR23-like polypeptide as defined herein, gives plants having increased yield-related traits relative to control plants. The invention provides nucleic acid sequences encoding WDR23-like polypeptides and WDR23-like polypeptides, whereby increased expression of the isolated nucleic acid sequences in plants increase yield-related traits relative to control plants.

[0145] A preferred method for modulating (preferably, increasing) expression of a nucleic acid encoding a PATL polypeptide, or a PRP38 polypeptide, or a GATA-like polypeptide, or ADA2 polypeptide, or a WDR23-like polypeptide is by introducing and expressing in a plant a nucleic acid encoding a PATL polypeptide, or a PRP38 polypeptide, or GATA-like polypeptide, or ADA2 polypeptide, or a WDR23-like polypeptide and optionally selecting for plants having enhanced yield-related traits.

[0146] Any reference hereinafter to a “protein useful in the methods of the invention” is taken to mean a PATL polypeptide, or a PRP38 polypeptide, or GATA-like polypeptide, or ADA2 polypeptide, or WDR23-like polypeptide as defined herein. Any reference hereinafter to a “nucleic acid useful in the methods of the invention” is taken to mean a nucleic acid capable of encoding such a PATL polypeptide, or a PRP38 polypeptide, or GATA-like polypeptide, or ADA2 polypeptide, or WDR23-like polypeptide. The nucleic acid to be introduced into a plant (and therefore useful in performing the methods of the invention) is any nucleic acid encoding the type of protein which will now be described, also named “PATL nucleic acid” or “PATL gene” or PRP38 nucleic acid” or “PRP38 gene”, or “GATA-like nucleic acid” or “GATA-like gene”, or “ADA2 nucleic acid” or “ADA2 gene”, or “WDR23-like nucleic acid sequence” or “WDR23-like gene”.

[0147] A “PATL polypeptide” as defined herein refers to any polypeptide comprising:
[0148] (i) a SEC14 domain and/or
[0149] (ii) a GOLD domain

[0150] The SEC 14 and GOLD domains are typically located in the C-terminal region of PATL polypeptides. The N-terminus of PATL polypeptides is variable in length and has a more divergent amino acid sequence composition than the C-terminus. The N-terminus is characterized by enrichment in acidic amino acids (PI-isoelectric poing-approximately 4) such as Glutamic acid (E) and contains numerous EEK (Glutamic-Glutamic-Lysine) repeats. In addition the N-terminus sequence is predicted to comprise one or more coiled coil, which are a common protein oligomerization-folding motif. Coiled coil domain usually contain hydrophobic and hydrophilic amino acid residues that form alpha-helices which in a cytoplasmic enviroment may wrap the hydrophobic strands against each other between the hydrophilic amino acids providing thermodynamic driving force for dimerization. Coiled coils may be readily identified using methods and software well described in the art such as COILs or PAIRCIOL2 (Lupas, et al; 1991. Science, 252, 1162-1164; MacDonnell et al. 2006. Bioinformatics.; 22(3):356-8. FIG. 1 shows the characteristic EEK repeats and a coiled coil domain as present in SEQ ID NO: 2.

[0151] Preferred PATL polypeptides useful in the methods of the invention comprise an acidic N-terminus having one or more of the following features:
[0152] (i) an isoelectric point in increasing order of preference of below 5, 4.5, 4, 3.5, or 3;
[0153] (ii) one or more coiled coils, preferably in increasing order of preference one, two, three, four or five.
[0154] (iii) one or more EEK repeats, preferably in increasing order of preference one, two, three, four, five, six or seven.

[0155] The N-terminus of a PATL polypeptide as referred herein is the portion of the protein extending at the N-terminus of the SEC14 domain.

[0156] The isoelectric point of a polypeptide, that is, the pH at which a particular molecule or surface carries no net electrical charge, may be calculated by methods well known in the art (Stryer, 1995) using for example the Henderson-Hasselbalch equation (Henderson (1908), Am. J. Physiol., 21, 173-179; Hasselbalc (1917), Biochemische Zeitschrift, 78, 112-144. de Livie, (2003) J. Chem. Educ., 80, 146).

[0157] Typically, PATL polypeptides comprise a SEC14 domain following the above-described N-terminus. The SEC14 domain in PATL polypeptides includes a region of homology to the yeast Sec14p protein which comprises the phospholipid binding pocket. The E, K and G amino acid residues involved in lipid binding and/or transfer in the yeast Sec14p are conserved in PATL polypeptides, which in SEQ ID NO: 2 correspond to E434, K465, and G493 (FIG. 1). Glutamic acid E434 and Lysine K465 of SEQ ID NO: 2 are the homologous residues to E207 and K239 of the yeast Sec14p protein which form a salt bridge involved in selectivity and binding to Ptdlns. The hydrophobic pocket of the yeast Sec14P is also conserved in PATL polypeptides.

[0158] PATL polypeptides may comprise a GOLD domain which is typically found at the C-terminus. The GOLD domain in PATL polypeptide is rich in Lysine residues and contains the conserved sequence KX(10-11)(K/R/T)KKKX(0-1)(L/V/A)(L/V/A)YR (see FIG. 2) which is similar to the Ptdlns (4,5)P2 binding motif found in clathrin-coated vesicle proteins.

[0159] A preferred PATL polypeptide useful in the methods of the invention comprises at least one of the following domains:
[0160] (i) A SEC14 domain as represented by SEQ ID NO: 71: lpeldsvvfyrgadreghpvcynvygefqdkdlyekafgdeekrerflkwriqllergilsqldfspsgicsmvqvtdlkns ppmlgkhravtrqavallqdnypefiakkvfinvpwwylaankmmspfltqrtkskfifaspaksaetlfryiapeqvpvgqfgglfk, or a domain having in increasing order of preference at least 50%, 55%, 60%, 65%, 70%, 75%, 80%, 82%, 85%, 90%, 92%, 95%, 97% or more sequence identity to the domain represented by SEQ ID NO: 71, or to any SEC14 domain as present in any of the polypeptides of Table A;
[0161] (ii) A GOLD domain as represented by SEQ ID NO: 72: sdavteltikpssketveipvtenstigwelrvlgwevsygaeftpdaeggytvivqktrkvpaneepimkgsfkvgepg kivltinnpaskkkkllyrskv, or a domain having in increasing order of preference at least 50%, 55%, 60%, 65%, 70%, 75%, 80%, 82%, 85%, 90%, 92%, 95%, 97% or more sequence identity to the domain represented by SEQ ID NO: 72, or to any GOLD domain as present in any of the polypeptides of Table A.

[0162] Further preferably a PATL polypeptide useful in the methods of the invention comprise at least one of the conserved motifs Motif Ia and Motif IIa as represented by SEQ ID NO: 69/L(L/T)KFLRAR and SEQ ID NO: 70/(L/F)(Q/E)DNYPEF respectively.

[0163] The PATL polypeptides useful in the methods of the invention are preferably those having in increasing order of preference at least 50%, 55%, 60%, 70%, 75%, 80%, 85%, 90%, 92%, 93%, 95%, 96%, 98% or more sequence identity to any of polypeptide given in Table A.

[0164] A SEC14 domain and a GOLD domain comprised in a PATL polypeptide may be identified by searching specialized databases containing collections of multiple sequence alignments and hidden Markov models covering conserved protein domains and families, such as Pfam which available at the Sanger Institute, United Kingdom. Alternatively the domains above-mentioned may be found by scanning The Integrated Resource of Protein Families, Domains and Sites (InterPro) database to detect a significant sequence alignment with known SEC14 or GOLD domains (see Example 4). Interpro database is an integrated interface for the commonly used signature databases for text- and sequence-based searches. The InterPro database combines these databases, which use different methodologies and varying degrees of biological information about well-characterized proteins to derive protein signatures. Collaborating databases include SWISS-PROT, PROSITE, TrEMBL, PRINTS, ProDom and Pfam, Smart and TIGRFAMs. Interpro is hosted at the European Bioinformatics Institute in the United Kingdom. A significant alignment between the sequence of two polypeptides or two domains as defined herein is an alignment having in increasing order of preference an e-value lower than e⁻⁵ (e to the minus 5), 1.e−¹⁰, 1.e⁻¹⁵, 1.e⁻²⁰, 1.e⁻²⁵, 1.e⁻⁵⁰, 1.e⁻⁷⁵, 1.e⁻¹⁰⁰, 1.e⁻²⁰⁰, 1.e⁻³⁰⁰, 1.e⁻⁴⁰⁰, 1.e⁻⁵⁰⁰, 1.e⁻⁶⁰⁰, 1.e⁻⁷⁰⁰ and 1.e⁻⁸⁰⁰. The polypeptide sequences may be aligned using any of the methods well known in the art, including global and local alignment methods such as Blast algorithms, e.g. the algorithm described in Altschul, SF, et al. (1990) J. Mol. Biol. 215:403-10. The probability for the alignment to occur with a given sequence is taken as basis for identifying similar polypeptides. A parameter that is typically used to represent such probability is called an e-value (E-value). The E-value is a measure of the reliability of the S score. The S score is a measure of the similarity of the two sequenced being aligned. The e-value describes how often a given S score is expected to occur at random. The e-value may be as high as 1.0.

[0165] Preferably PATL polypeptides useful in the methods of the invention comprise at least one of the following domains:
[0166] (i) a SEC14 domain having in increasing order of preference an e-value lower than e⁻⁵ (e to the minus 5), 1.e −¹⁰, 1.e⁻¹⁵, 1.e⁻²⁰, 1.e⁻²⁵, 1.e⁻⁵⁰, 1.e⁻⁷⁵, 1.e⁻¹⁰⁰, 1.e⁻²⁰⁰, 1.e⁻³⁰⁰, 1.e⁻⁴⁰⁰, 1.e⁻⁵⁰⁰, 1.e⁻⁶⁰⁰, 1.e⁻⁷⁰⁰ and 1.e⁻⁸⁰⁰ when aligned with a known SEC14 domain, more preferably when aligned to any of the SEC14 domains of Table C;
[0167] (ii) a GOLD domain having in increasing order of preference an e-value lower than e⁻⁵ (e to the minus 5), 1.e−¹⁰, 1.e⁻¹⁵, 1.e⁻²⁰, 1.e⁻²⁵, 1.e⁻⁵⁰, 1.e⁻⁷⁵, 1.e⁻¹⁰⁰, 1.e⁻²⁰⁰, 1.e⁻³⁰⁰, 1.e⁻⁴⁰⁰, 1.e⁻⁵⁰⁰, 1.e⁻⁶⁰⁰, 1.e⁻⁷⁰⁰ and 1.e⁻⁸⁰⁰ when aligned with a known GOLD domain, more preferably when aligned to any of the GOLD domains of Table C.

[0168] Preferably, the PATL polypeptide sequence useful in the methods of the invention is one which when used in the construction of a phylogenetic tree, such as the one depicted in FIG. 3, clusters with any of the sequences in the tree, more preferably with the sequences in group Ia which comprises SEQ ID NO: 2.

[0169] The term “domain” and “motif” is defined in the “definitions” section herein. Specialist databases exist for the identification of domains, for example, SMART (Schultz et al. (1998) Proc. Natl. Acad. Sci. USA 95, 5857-5864; Letunic et al. (2002) Nucleic Acids Res 30, 242-244), InterPro (Mulder et al., (2003) Nucl. Acids. Res. 31, 315-318), Prosite (Bucher and Bairoch (1994), A generalized profile syntax for biomolecular sequences motifs and its function in automatic sequence interpretation. (In) ISMB-94; Proceedings 2nd International Conference on Intelligent Systems for Molecular Biology. Altman R., Brutlag D., Karp P., Lathrop R., Searls D., Eds., pp 53-61, AAAI Press, Menlo Park; Hulo et al., Nucl. Acids. Res. 32:D134-D137, (2004)), or Pfam (Bateman et al., Nucleic Acids Research 30(1): 276-280 (2002)). A set of tools for in silico analysis of protein sequences is available on the ExPASy proteomics server (Swiss Institute of Bioinformatics (Gasteiger et al., ExPASy: the proteomics server for in-depth protein knowledge and analysis, Nucleic Acids Res. 31:3784-3788 (2003)). Domains or motifs may also be identified using routine techniques, such as by sequence alignment.

[0170] Methods for the alignment of sequences for comparison are well known in the art, such methods include GAP, BESTFIT, BLAST, FASTA and TFASTA. GAP uses the algorithm of Needleman and Wunsch ((1970) J Mol Biol 48: 443-453) to find the global (i.e. spanning the complete sequence) alignment of two sequences that maximizes the number of matches and minimizes the number of gaps. The BLAST algorithm (Altschul et al. (1990) J Mol Biol 215: 403-10) calculates percent sequence identity and performs a statistical analysis of the similarity between the two sequences. The software for performing BLAST analysis is publicly available through the National Centre for Biotechnology Information (NCBI). Homologues may readily be identified using, for example, the ClustalW multiple sequence alignment algorithm (version 1.83), with the default pairwise alignment parameters, and a scoring method in percentage. Global percentages of similarity and identity may also be determined using one of the methods available in the MatGAT software package (Campanella et al., BMC Bioinformatics. 2003 Jul. 10; 4:29. MatGAT: an application that generates similarity/identity matrices using protein or DNA sequences). Minor manual editing may be performed to optimise alignment between conserved motifs, as would be apparent to a person skilled in the art. Furthermore, instead of using full-length sequences for the identification of homologues, specific domains may also be used. The sequence identity values may be determined over the entire nucleic acid or amino acid sequence or over selected domains or conserved motif(s), using the programs mentioned above using the default parameters. For local alignments, the Smith-Waterman algorithm is particularly useful (Smith T F, Waterman M S (1981) J. Mol. Biol 147(1);195-7).

[0171] Furthermore, PATL polypeptides typically have Phosphatidylinositide (Ptdlns) and/or Phosphatidylcholine (PtdCho) binding activity. Preferably they bind Phosphatidylinositol. Phosphatidylinositol refers to any glycophospholipid with its sn-glycerol 3-phosphate residue esterified to the 1-hydroxyl group of 1D-myo-inositol. Alternatively PATL polypeptides typically catalyze the transfer of Phosphatidylinosito and Phosphatidylcholine between membranes in vitro. Methods to assay PtdIns/PtdCho binding and or transfer through membranes are well know in the art (Bankaitis Va., et al. (1990). Nature 347: 561-2; Peterman et al. (2004)).

[0172] Alternatively, PATL nucleic acids may be identified in a functional complementation test by their ability to complement the defective growth phenotype of Saccharomyces cerevisie sec14 temperature sensitive mutants. In this in vivo, test the PATL nucleic acids are capable of expressing a PATL polypeptide in yeast. Several S. cerevisie sec14 temperature sensitive mutant strains and methods for their complementation are well known in the art (Kearns et al. (1998) EMBO J. 17, 4004-17; Kapranov et al. (2001); Lee et al. (2000) Biochym biophys Acta 1486:55-71).

[0173] In addition, PATL polypeptides, PRP38 polypeptides, GATA-like polypeptides, or ADA2 polypeptides, when expressed in rice and evaluated according to the methods of the present invention as outlined in Examples 7 and 8, give plants having enhanced yield related traits, in particular any one or more of total seed weight, seed filling rate, number of filled seeds and total number of flowers per panicle.

[0174] The present invention is illustrated by transforming plants with the nucleic acid sequence represented by SEQ ID NO: 1, encoding the polypeptide sequence of SEQ ID NO: 2, or SEQ ID NO: 76, encoding the polypeptide sequence of SEQ ID NO: 77, or SEQ ID NO: 128, encoding the polypeptide sequence of SEQ ID NO: 129, or SEQ ID NO: 181, encoding the polypeptide sequence of SEQ ID NO: 182, or SEQ ID NO: 215, encoding the WDR23-like polypeptide sequence of SEQ ID NO: 216. However, performance of the invention is not restricted to these sequences; the methods of the invention may advantageously be performed using any PATL-encoding nucleic acid or PATL polypeptide, PRP38-encoding nucleic acid or PRP38 polypeptide, or GATA-like-encoding nucleic acid or GATA-like polypeptide, or ADA2-encoding nucleic acid or ADA2 polypeptide, or a WDR23-like polypeptide as defined herein.

[0175] Examples of nucleic acids encoding PATL polypeptides, or PRP38 polypeptides, or GATA-like polypeptides, or ADA2 polypeptides, or WDR23-like polypeptides are given in Table A of Example 1 herein. Such nucleic acids are useful in performing the methods of the invention. The amino acid sequences given in Table A of Example 1 are example sequences of orthologues and paralogues of the PATL polypeptide represented by SEQ ID NO: 2, or of the PRP38 polypeptide represented by SEQ ID NO: 77 or of the GATA-like polypeptide represented by SEQ ID NO: 129, or of the ADA2 polypeptide represented by SEQ ID NO: 182, or of the WDR23-like polypeptide represented by SEQ ID NO: 216, the terms “orthologues” and “paralogues” being as defined herein. Further orthologues and paralogues may readily be identified by performing a so-called reciprocal blast search. Typically, this involves a first BLAST involving BLASTing a query sequence (for example using any of the sequences listed in Table A of Example 1) against any sequence database, such as the publicly available NCBI database. BLASTN or TBLASTX (using standard default values) are generally used when starting from a nucleotide sequence, and BLASTP or TBLASTN (using standard default values) when starting from a protein sequence. The BLAST results may optionally be filtered. The full-length sequences of either the filtered results or non-filtered results are then BLASTed back (second BLAST) against sequences from the organism from which the query sequence is derived (where the query sequence is SEQ ID NO: 1 or SEQ ID NO: 2, the second BLAST would therefore be against Oryza sativa sequences; or where the query sequence is SEQ ID NO: 76 or SEQ ID NO: 77, SEQ ID NO: 128 or SEQ ID NO: 129, SEQ ID NO: 181 or SEQ ID NO: 182, or SEQ ID NO: 215 or SEQ ID NO: 216, the second BLAST would therefore be against Arabidopsis thaliana sequences). The results of the first and second BLASTs are then compared. A paralogue is identified if a high-ranking hit from the first blast is from the same species as from which the query sequence is derived, a BLAST back then ideally results in the query sequence amongst the highest hits; an orthologue is identified if a high-ranking hit in the first BLAST is not from the same species as from which the query sequence is derived, and preferably results upon BLAST back in the query sequence being among the highest hits.

[0176] PRP38 domain refers to a conserved amino acid sequence found in polypeptides that can function as pre-mRNA processing factors. It typically has about 170 amino acids in length, but is shorter in Ostta_PRP38_{—}1 and longer in Vitvi_PRP38_{—}1 polypeptides for example (see Table C). PRP38 domains can be represented by any one of the PRP38 domain sequences of Table C and by any polypeptide domain having in increasing order of preference at least 50%, 55%, 60%, 65%, 70%, 75%, 80%, 85%, 90%, 92%, 95%, 98% or more sequence identity to any one of the PRP38 domains of Table C. PRP38 domains may comprise one or more highly conserved sequence motifs as represented by SEQ ID NO: 123 and SEQ ID NO: 124.

[0177] Alternatively, a PRP38 domain may be defined as any polypeptide domain significantly aligning to a known PRP38 polypeptide, preferably to any one of the polypeptides of Table A. A significant alignment between two polypeptides or two domains as defined herein is an alignment having in increasing order of preference an e-value lower than e−5 (e to the minus 5), 1.e−¹⁰, 1.e⁻¹⁵, 1.e⁻²⁰, 1.e⁻²⁵, 1.e⁻⁵⁰, 1.e⁻⁷⁵, 1.e⁻¹⁰⁰, 1.e⁻²⁰⁰, 1.e⁻³⁰⁰, 1.e⁻⁴⁰⁰, 1.e⁻⁵⁰⁰, 1.e⁻⁶⁰⁰, 1.e⁻⁷⁰⁰ and 1.e⁻⁸⁰⁰. The polypeptide sequences may be aligned using any of the methods well known in the art, including global and local alignment methods such as Blast algorithms, e.g. the algorithm described in Altschul, SF, et al. (1990) J. Mol. Biol. 215:403-10. The probability for the alignment to occur with a given sequence is taken as basis for identifying similar polypeptides. A parameter that is typically used to represent such probability is called an e-value (E-value). The E-value is a measure of the reliability of the S score. The S score is a measure of the similarity of the query sequence to the known sequence comprising the PRP38 domain. The e-value describes how often a given S score is expected to occur at random. The e-value cut-off may be as high as 1.0.

[0178] Preferably PRP38 polypeptides useful in the methods of the invention comprise a PRP38 domain having in increasing order of preference an e-value lower than e−5, 1.e−¹⁰, 1.e⁻¹⁵, 1.e⁻²⁰, 1.e⁻²⁵, 1.e⁻⁵⁰, 1.e⁻⁷⁵, 1.e⁻¹⁰⁰, 1.e⁻²⁰⁰, 1.e⁻³⁰⁰, 1.e⁻⁴⁰⁰, 1.e⁻⁵⁰⁰, 1.e⁻⁶⁰⁰, 1.e⁻⁷⁰⁰ and 1.e⁻⁸⁰⁰ when aligned with a known PRP38 domain, more preferably when aligned to any one of the PRP38 domains of Table C.

[0179] A PRP38 domain occurring in a polypeptide may be identified by searching specialized databases containing collections of multiple sequence alignments and hidden Markov models covering conserved protein domains and families, such as Pfam which available at the Sanger Institute, United Kingdom. Example 2 herein shows the results of a Pfam search using PRP38 polypeptides as query sequence.

[0180] A DUF1777 domain is a conserved amino acid sequence found in a small subset of the proteins described to date. It is typically 140 to 150 amino acids in length, although much shorter versions are also found, see for example the DUF1777 domain of the Chlre_PRP38_{—}1 polypeptide (Table C). DUF1777 domains have been identified in different living organism based on sequence homology. A compilation of DUF domains can be found in the Pfam database available at the Sanger Institute (UK). The presence of a DUF1777 domain in a polypeptide may be readily identified by searching specialized databases containing collections of multiple sequence alignments and hidden Markov models covering conserved protein domains and families, such as Pfam. A polypeptide comprising a DUF1777 domain will register as a hit with a previously known DUF1777 domain in a search in Pfam database. The amino acid sequences of DUF1777 domains in proteins of eukaryotic origin are often largely divergent, with only a few amino acid residues precisely conserved. Typically the e-value of an alignment of two DUF1777 domains is high, typically above 0.001, more typically above 0.01.

[0181] Preferably PRP38 polypeptides useful in the methods of the invention comprise a DUF1777 domain having in increasing order of preference an e-value lower than 1.e⁻⁵, 1.e−¹⁰, 1.e⁻¹⁵, 1.e⁻²⁰, 1.e⁻²⁵, 1.e⁻⁵⁰, 1.e⁻⁷⁵, 1.e⁻¹⁰⁰, 1.e⁻²⁰⁰, 1.e⁻³⁰⁰, 1.e⁻⁴⁰⁰, 1.e⁻⁵⁰⁰, 1.e⁻⁶⁰⁰, 1.e⁻⁷⁰⁰ and 1.e⁻⁸⁰⁰ when aligned with a known DUF1777 domain, more preferably when aligned to any one of the DUF1777 domains of Table C.

[0182] More preferably, PRP38 polypeptides useful in the methods of the invention comprise a DUF1777 having in increasing order of preference at least 50%, 55%, 60%, 65%, 70%, 75%, 80%, 85%, 90%, 92%, 95%, 98% or more sequence identity to any one of the DUF1777 domains of Table C.

[0183] A DUF1777 domain occurring in a polypeptide may be identified by searching specialized databases containing collections of multiple sequence alignments and hidden Markov models covering conserved protein domains and families, such as Pfam available at the Sanger Institute, United Kingdom. Example 2 herein shows the results of a Pfam search using PRP38 polypeptides as query sequence

[0184] PRP38 polypeptides may comprise an RS domain. An RS domain is a polypeptide region rich in Arginine (R) and Serine (S) amino acid residues. RS domains comprise a multiplicity of dipeptides as represented by the sequence RS (Arginine-Serine), RE (Arginine-Glutamic acid), RD (Arginine-Aspartic acid). Typically the dipeptides are spread over a region of the PRP38 polypeptide extending from 4 to 150 amino acids. The dipeptides above-mentioned may occur in clusters, such clusters composed exclusively of any one or more of the RS, RE, RD dipeptides and being typically between 4 and 40 amino acids long.

[0185] Preferably, the PRP38 polypeptides useful in the methods of the invention comprise one or more of the dipeptides RS, RE, RD in a stretch of 4, 6, 8, 10, 12, 14, 20, 24, 30, 40, 50, 100 or more until a maximum of 150 amino acids.

[0186] More preferably, the PRP38 polypeptides useful in the methods of the invention comprise two or more dipeptide clusters having exclusively RS, RE and/or RD amino acid residues. Further preferably, the PRP38 polypeptide comprises 4 dipeptide clusters, most preferably the dipeptide cluster represented by RSRSRSRS.

[0187] PRP38 polypeptides may additionally comprise any one or more of the following conserved sequence motifs:
[0188] (iv) SEQ ID NO: 120/Motif Ib: RRPPSVKASLSVSFGQRAPHRASTRDSSPVRRT, or a motif having in increasing order of preference at least 50%, 55%, 60%, 65%, 70%, 75%, 80%, 85%, 90%, 95% or more sequence identity to Motif Ib; and/or
[0189] (v) SEQ ID NO: 121/Motif IIb: SPYIRA(I/V)GFLYLRY, or a motif having in increasing order of preference at least 50%, 55%, 60%, 65%, 70%, 75%, 80%, 85%, 90%, 95% or more sequence identity to Motif IIb; and/or
[0190] (vi) SEQ ID NO: 122/Motif IIIb: KLKDLYGD, or a motif having in increasing order of preference at least 50%, 55%, 60%, 65%, 70%, 75%, 80%, 85%, 90%, 95% or more sequence identity to Motif IIIb.

[0191] Preferably, PRP38 polypeptides useful in the methods of the invention comprise any one or more of the following motifs:
[0192] (i) Motif 1b (SEQ ID NO: 120) wherein any amino acid residue may be substituted by a conservative amino acid and/or up to 50% of the amino acid residues may be substituted by a non conservative amino acid.
[0193] (ii) Motif 1b (SEQ ID NO: 121) wherein any amino acid residue may be substituted by a conservative amino acid and/or up to 50% of the amino acid residues may be substituted by a non conservative amino acid.
[0194] (iii) Motif 1b (SEQ ID NO: 122) wherein any amino acid residue may be substituted by a conservative amino acid and/or up to 50% of the amino acid residues may be substituted by a non conservative amino acid.

[0195] The PRP38 polypeptides useful in the methods of the invention are preferably those having in increasing order of preference at least 50%, 55%, 60%, 70%, 75%, 80%, 85%, 90%, 92%, 93%, 95%, 96%; 6%; 98% or more sequence identity to any of polypeptide given in Table A.

[0196] Preferably, the PRP38 polypeptide sequence useful in the methods of the invention is one which when used in the construction of a phylogenetic tree, such as the one depicted in FIG. 8, clusters with any of the sequences in group Ib which comprises SEQ ID NO: 77.

[0197] Typically in PRP38 polypeptides, PRP38 domain is found at the N-terminus and DUF1777 domain at the C-terminus. PRP38 polypeptides typically have an acidic C-terminus and are localized in the nucleus.

[0198] Furthermore, PRP38 polypeptides typically have pre-mRNA splicing activity. Tools and techniques for measuring pre-mRNA splicing activity are well known in the art (Blanton S, et al. (1992) Mol Cell Biol 12(9):3939-47; Stevens SW and Abelson J (1999) Proc Natl Acad Sci USA 96(13):7226-31; Gottschalk A, et al. (1999) EMBO J 18(16):4535-48; Pandit S, et al. (2006) Proc Natl Acad Sci USA 103(37):13700-5).

[0199] In addition, PRP38 polypeptides, when expressed in rice according to the methods of the present invention as outlined in Examples 7 and 8, give plants having enhanced yield related traits, in particular any one or more of above ground leaf biomass, emergence vigour, total seed weight, seed filling rate, harvest index, and total number of seeds.

[0200] The present invention is illustrated by transforming plants with the nucleic acid sequence represented by SEQ ID NO: 76, encoding the polypeptide sequence of SEQ ID NO: 77. However, performance of the invention is not restricted to these sequences; the methods of the invention may advantageously be performed using any PRP38-encoding nucleic acid or PRP38 polypeptide as defined herein.

[0201] A “GATA-like polypeptide” as defined herein refers to any Zn finger transcription factor comprising a GATA domain (as defined in for example the SMART database under accession SM00401). Preferably, the “GATA-like polypeptide” useful in the methods of the present invention comprises a single GATA domain with 18 or 20 amino acids between the second and the third Cys residue of the Zn finger, more preferably there are 18 amino acids between the second and the third Cys residue of the Zn finger (CX₂CX₁₈CX₂C). The term “zinc finger” or “Zn finger” is known in the art and refers to the sequence motif in which cysteines and/or histidines coordinate a zinc atom to form local peptide structures that are required for specific functions.

[0202] Further preferably, the GATA-like polypeptide useful in the methods of the present invention belongs to subfamily II as defined by Reyes et al. (Plant Physiol. 134, 1718-1732, 2004).

[0203] Subfamily II GATA transcription factors typically consists of genes with 2 or 3 exons, where the zinc finger has been split between the 2 last exons. Subfamily II GATA transcription factors also has 18 residues in the Zn finger loop.

[0204] The GATA domain in the GATA-like polypeptide useful in the methods of the present invention preferably comprises a Class B type Zn finger as defined in Reyes et al. (2004). Class B Zn finger domains have 18 residues in the Zn finger loop, and are further characterised by the presence of a conserved Ser residue (in position 27 of the GATA domain shown in FIG. 11) and a conserved IRX(R/K)K motif.

[0205] Preferably, the GATA domain comprises motif 1c and/or motif 2c:

Motif 1c (SEQ ID NO: 130):
C(S/A/T)(D/E/N)CXT(T/S/A)(K/S)TP(L/M)WR(S/G/N)GP

wherein X can be any amino acid, preferably X is one of N, K, G, H, D.

| | |
|---|---|
| Motif 2c (SEQ ID NO: 131): | GPKSLCNACGIRX(R/K)K |

wherein X can be any amino acid, preferably X is one of Q, H, N, S, Y, F.

[0206] Preferably, the GATA-like polypeptide useful in the methods of the present invention also comprises

motif 3c (SEQ ID NO: 132:
(A/S)(A/W)X(L/C)(L/N)(M/L/V)(T/L/A)(L/D)(S/R)

wherein X can be any amino acid, preferably X is one of M, L, V, I, R.

[0207] Alternatively, the homologue of a GATA-like protein has in increasing order of preference at least 14%, 15%, 20%, 25%, 26%, 27%, 28%, 29%, 30%, 31%, 32%, 33%, 34%, 35%, 36%, 37%, 38%, 39%, 40%, 41%, 42%, 43%, 44%, 45%, 46%, 47%, 48%, 49%, 50%, 51%, 52%, 53%, 54%, 55%, 56%, 57%, 58%, 59%, 60%, 81%, 62%, 63%, 64%, 65%, 66%, 67%, 68%, 69%, 70%, 71%, 72%, 73%, 74%, 75%, 76%, 77%, 78%, 79%, 80%, 81%, 82%, 83%, 84%, 85%, 86%, 87%, 88%, 89%, 90%, 91%, 92%, 93%, 94%, 95%, 96%, 97%, 98%, or 99% overall sequence identity to the amino acid represented by SEQ ID NO: 129, provided that the homologous protein comprises the GATA domain as defined above and one or more of the conserved motifs of above. The overall sequence identity is determined using a global alignment algorithm, such as the Needleman Wunsch algorithm in the program GAP (GCG Wisconsin Package, Accelrys), preferably with default parameters. Compared to overall sequence identity, the sequence identity will generally be higher when only conserved domains or motifs are considered, such as the GATA domain.

[0208] Preferably, the polypeptide sequence which when used in the construction of a phylogenetic tree, such as the one depicted in FIG. 11 or FIG. 14 in Reyes et al. (2004), clusters with the “Subfamily II” group of GATA-like polypeptides as defined in Reyes et al. (2004), comprising the amino acid sequence represented by SEQ ID NO: 129, rather than with any other group.

[0209] Furthermore, GATA-like polypeptides (at least in their native form) typically have DNA-binding activity activity. The consensus DNA sequence that is recognised by the GATA-Zn finger is [AT]GATA[AG]. Tools and techniques for measuring DNA binding activity are well known in the art, see for example Teakle et al. (Plant Mol. Biol. 50, 43-57, 2002) or Ghirlando and Trainor (J. Biol. Chem. 278, 45620-45628, 2003).

[0210] In addition, GATA-like polypeptides, when expressed in rice according to the methods of the present invention as outlined in Examples 7 and 8, give plants having increased Thousand Kernel Weight.

[0211] The present invention is illustrated by transforming plants with the nucleic acid sequence represented by SEQ ID NO: 128, encoding the polypeptide sequence of SEQ ID NO: 129. However, performance of the invention is not restricted to these sequences; the methods of the invention may advantageously be performed using any GATA-like-encoding nucleic acid or GATA-like polypeptide as defined herein.

[0212] An “ADA2 polypeptide” as defined herein refers to any transcriptional adaptor polypeptide comprising two or more of the following motifs:
[0213] (vii) a Zinc (Zn) finger ZZ type domain
[0214] (viii) a SANT DNA binding domain
[0215] (ix) a Calcium EF hand domain
[0216] (x) a SWIRM domain

[0217] A prototype of Zinc (Zn) finger ZZ type domain is present in dystrophin, CBP/p300 protein. The Cys-x2-Cys motifs in ZZ domains are reminiscent of the Cys-x2-Cys knuckles that occur in zinc fingers. Four to six cysteine residues in the domain sequence are responsible for coordinating zinc ions, to reinforce the structure (Ponting et al. Trends Biochem Sci 1996; 21:11-13). The Zinc finger ZZ type domain in ADA2 polypeptides could be involved in facilitating protein-protein interactions. A fragment of Arabidopsis thaliana ADA2a and ADA2b proteins comprising the ZZ zinc finger domain has been shown to bind to GCN5 protein (Mao et al 2006).

[0218] A SANT DNA binding domain is a subfamily of the Myb DNA binding domain (Aasland et al. 1996 Trends Biochem Sci 1996; 21:87-88). Polypeptides comprising SANT DNA binding domains specifically recognize the sequence YAAC(G/T)G present in a gene promoter. Preferred ADA polypeptides useful in the methods of the invention bind to a gene promoter comprising the sequence YAAC(G/T)G where Y can be C or T).

[0219] The SWIRM domain (Pfam accession number PF04433) is a small alpha-helical domain of about 85 amino acid residues found in eukaryotic chromosomal proteins. It is named after the proteins SWI3, RSC8 and MOIRA in which it was first recognized. This domain is predicted to mediate protein-protein interactions in the assembly of chromatin-protein complexes Lenkart et al. Proc Natl Acad Sci USA. 2006; 103:2057-2062).

[0220] A Calcium (Ca) binding EF hand domain consists of a twelve residue loop flanked on both side by a twelve residue alpha-helical domain. In an EF-hand loop the calcium ion is coordinated in a pentagonal bipyramidal configuration. The six residues involved in the binding are in positions 1, 3, 5, 7, 9 and 12; these residues are denoted by X, Y, Z, −Y, −X and −Z. The invariant Glu or Asp at position 12 provides two oxygens for liganding Ca (bidentate ligand) (Finn and Forsen 1995 Structure, 3:7-11).

[0221] A preferred ADA2 polypeptide useful in the methods of the invention comprises two or more of the following domains:
[0222] (i) A Zinc (Zn) finger ZZ type domain as represented by SEQ ID NO: 207: kpglyccnycdkdlsglvrfkcavcmdfdlcvecfsvgvelnrhkn or a domain having in increasing order of preference at least 50%, 55%, 60%, 65%, 70%, 75%, 80%, 82%, 85%, 90%, 92%, 95%, 97% or more sequence identity to the domain represented by SEQ ID NO: 207 or to any Zn finger ZZ type domain as present in any one of the polypeptides of Table A;
[0223] (ii) A SANT DNA binding domain as represented by SEQ ID NO: 208: vtsdwnadeeillleaiatygfgnwkevadhvgsktttecikhfnsaym, or a domain having in increasing order of preference at least 50%, 55%, 60%, 65%, 70%, 75%, 80%, 82%, 85%, 90%, 92%, 95%, 97% or more sequence identity to the domain represented by SEQ ID NO: 208 or to any SANT domain as present in any one of the polypeptides of Table A;
[0224] (iii) A Ca binding EF hand domain as represented by SEQ ID NO: 209: dndaeqlladmef, or a domain having in increasing order of preference at least 50%, 55%, 60%, 65%, 70%, 75%, 80%, 82%, 85%, 90%, 92%, 95%, 97% or more sequence identity to the domain represented by SEQ ID NO: 209 or to any Ca binding EF hand domain as present in any one of the polypeptides of Table A;
[0225] (iv) A SWIRM domain as represented by SEQ ID NO: 210: priysgldtwdvdgllgadllsetekkmcnetrilpvhylkmldiltreikkgqikkksdaysffkvepskvdrvydmlvhkgi gdst, or a domain having in increasing order of preference at least 50%, 55%, 60%, 65%, 70%, 75%, 80%, 82%, 85%, 90%, 92%, 95%, 97% or more sequence identity to the domain represented by SEQ ID NO: 210 or to any SWRIM domain as present in any one of the polypeptides of Table A.

[0226] The ADA2 polypeptides useful in the methods of the invention are preferably those having in increasing order of preference at least 50%, 55%, 60%, 70%, 75%, 80%, 85%, 90%, 92%, 93%, 95%, 96%, 98% or more sequence identity to any of polypeptide given in Table A.

[0227] A Zinc (Zn) finger ZZ type domain, a SANT DNA binding, a Calcium EF hand domain and a SWIRM domain comprised in a polypeptide may be identified by searching specialized databases containing collections of multiple sequence alignments and hidden Markov models covering conserved protein domains and families, such as Pfam which available at the Sanger Institute, United Kingdom. Alternatively the domains abovementioned may be found by scanning The Integrated Resource of Protein Families, Domains and Sites (InterPro) database to detect a significant sequence alignment with known Zinc (Zn) finger ZZ type domain, a SANT DNA binding, a Calcium EF hand domain and a SWIRM domain. Interpro database is an integrated interface for the commonly used signature databases for text- and sequence-based searches. The InterPro database combines these databases, which use different methodologies and varying degrees of biological information about well-characterized proteins to derive protein signatures. Collaborating databases include SWISS-PROT, PROSITE, TrEMBL, PRINTS, ProDom and Pfam, Smart and TIGRFAMs. Interpro is hosted at the European Bioinformatics Institute in the United Kingdom. A significant alignment between the sequence of two polypeptides or two domains as defined herein is an alignment having in increasing order of preference an e-value lower than e⁻⁵ (e to the minus 5), 1.e−¹⁰, 1.e⁻¹⁵, 1.e⁻²⁰, 1.e⁻²⁵, 1.e⁻⁵⁰, 1.e⁻⁷⁵, 1.e⁻¹⁰⁰, 1.e⁻²⁰⁰, 1.e⁻³⁰⁰, 1.e⁻⁴⁰⁰, 1.e⁻⁵⁰⁰, 1.e⁻⁶⁰⁰, 1.e⁻⁷⁰⁰, 1.e⁻⁸⁰⁰. The polypeptide sequences may be aligned using any of the methods well known in the art, including global and local alignment methods such as Blast algorithms, e.g. the algorithm described in Altschul, SF, et al. (1990) J. Mol. Biol. 215:403-10. The probability for the alignment to occur with a given sequence is taken as basis for identifying similar polypeptides. A parameter that is typically used to represent such probability is called an e-value (E-value). The E-value is a measure of the reliability of the S score. The S score is a measure of the similarity of the two sequenced being aligned. The e-value describes how often a given S score is expected to occur at random. The e-value may be as high as 1.0.

[0228] Preferably ADA2 polypeptides useful in the methods of the invention comprise two or more of the following domains:
[0229] (i) A Zinc (Zn) finger ZZ type domain having in increasing order of preference an e-value lower than e-5, 1.e-10, 1.e-15, 1.e-20, 1.e-25, 1.e-50, 1.e-75, 1.e-100, 1.e-200, 1.e-300, 1.e^{-400, 1}.e-500, 1.e-600, 1.e-700 and 1.e-800 when aligned with a known Zn finger ZZ type domain, more preferably when aligned to any one of the Zn finger ZZ type of Table C;
[0230] (ii) A SANT DNA binding domain having in increasing order of preference an e-value lower than e-5, 1.e-10, 1.e-15, 1.e-20, 1.e-25, 1.e-50, 1.e-75, 1.e-100, 1.e-200, 1.e-300, 1.e-400, 1.e-500, 1.e-600, 1.e-700 and 1.e-800 when aligned with a known SANT DNA binding domain, more preferably when aligned to any one of the SANT DNA binding domain domains of Table C;
[0231] (iii) A Calcium EF hand domain having in increasing order of preference an e-value lower than e-5, 1.e-10, 1.e-15, 1.e-20, 1.e-25, 1.e-50, 1.e-75, 1.e-100, 1.e-200, 1.e-300, 1.e-400, 1.e-500, 1.e-600, 1.e-700 and 1.e-800 when aligned with a known Calcium EF hand domain, more preferably when aligned to any one of the Calcium EF hand domains of Table C.
[0232] (iv) A SWIRM domain having in increasing order of preference an e-value lower than e-5, 1.e^{-10, 1}.e-15, 1.e-20, 1.e-25, 1.e-50, 1.e-75, 1.e-100, 1.e-200, 1.e-300, 1.e-400, 1.e-500, 1.e^{-600, 1}.e-700 and 1.e-800 when aligned with a known SWIRM domain domain, more preferably when aligned to any one of the SWIRM domain domains of Table C.

[0233] Alternatively, an ADA2 polypeptide may be defined as any polypeptide significantly aligning to a known ADA2 polypeptide, preferably to any one of the polypeptides of Table A.

[0234] Preferably, the ADA2 polypeptide sequence useful in the methods of the invention is one which when used in the construction of a phylogenetic tree, such as the one depicted in FIG. 17, clusters with any of the sequences in the tree, more preferably with the sequences in group Id which comprises SEQ ID NO: 182.

[0235] Typically in ADA2 polypeptides, Zn Finger ZZ domain is found at the N-terminus, the SANT-DNA binding domain in the central portion and the SWIRM domain is found at the C-terminus. ADA2 polypeptides and typically localized in the nucleus of the cell. The plant ADA2 polypeptides may comprise a nuclear localization signal as for example that shown in FIG. 15 for SEQ ID NO: 182.

[0236] Furthermore, ADA2 polypeptides typically enhance the ability of GCN5 to acetylate histones in vitro and enable GCN5 to acetylate nucleosomal histones. Tools and techniques for measuring histone acetylation have been previously described (Stockinger et al 2001; Mao et al. 2006). Regulation of the activity of ADA2 polypeptides of plant origin in plant cells may occur via acetylation. It has been proposed that lysine residues K257 and K215 in ADA2a in ADA2b of Arabidopsis thalina could be acetylated.

[0237] The invention provides nucleic acid sequences encoding WDR23-like polypeptides and WDR23-like polypeptides, whereby increased expression of the isolated nucleic acid sequences in plants increase yield-related traits relative to control plants.

[0238] According to one embodiment of the present invention, there is therefore provided an isolated nucleic acid sequence encoding a WDR23-like polypeptide comprising:
[0239] (i) an isolated nucleic acid sequence as represented by SEQ ID NO: 219, SEQ ID NO: 225, or SEQ ID NO: 229;
[0240] (ii) the complement of an isolated nucleic acid sequence as represented by SEQ ID NO: 219, SEQ ID NO: 225, or SEQ ID NO: 229;
[0241] (iii) an isolated nucleic acid sequence encoding a polypeptide sequence as represented by SEQ ID NO: 220, SEQ ID NO: 226, or SEQ ID NO: 230;
[0242] (iv) an isolated nucleic acid sequence deduced from a polypeptide sequence as represented by SEQ ID NO: 220, SEQ ID NO: 226, or SEQ ID NO: 230, as a result of the degeneracy of the genetic code;
[0243] (v) an isolated nucleic acid sequence capable of stringently hybridising to a nucleic acid sequence as represented by SEQ ID NO: 219, SEQ ID NO: 225, or SEQ ID NO: 229, or to its complement;
[0244] (vi) an isolated nucleic acid sequence which encodes a polypeptide having in increasing order of preference at least 50%, 55%, 60%, 65%, 70%, 75%, 80%, 85%, 90%, 95%, 96%, 97%, 98%, 99% or more amino acid sequence identity with a polypeptide sequence as represented by SEQ ID NO: 220, SEQ ID NO: 226, or SEQ ID NO: 230;
[0245] (iv) an isolated nucleic acid sequence which encodes a polypeptide comprising a domain having, in increasing order of preference, at least 65%, 70%, 75%, 80%, 85%, 90%, 95%, 96%, 97%, 98%, 99% or more amino acid sequence identity with a Conserved Domain as represented by SEQ ID NO: 271.

[0246] According to a further embodiment of the present invention, there is also provided an isolated WDR23-like polypeptide comprising:
[0247] (i) a polypeptide sequence represented by SEQ ID NO: 220, SEQ ID NO: 226, or SEQ ID NO: 230;
[0248] (ii) a polypeptide sequence having, in increasing order of preference, at least 50%, 55%, 60%, 65%, 70%, 75%, 80%, 85%, 90%, 95%, 96%, 97%, 98%, 99% amino acid sequence identity with a polypeptide sequence as represented by SEQ ID NO: 220, SEQ ID NO: 226, or SEQ ID NO: 230;
[0249] (iii) a polypeptide comprising a domain having, in increasing order of preference, at least 65%, 70%, 75%, 80%, 85%, 90%, 95%, 96%, 97%, 98%, 99% or more amino acid sequence identity with a Conserved Domain as represented by SEQ ID NO: 271;
[0250] (iii) derivatives of any of the polypeptide sequences given in (i) to (iii) above.

[0251] According to a further embodiment, the present invention provides a method for increasing yield-related traits in plants relative to control plants, comprising increasing expression in a plant of a nucleic acid sequence encoding a WDR23-like polypeptide.

[0252] A preferred method for increasing expression of a nucleic acid sequence encoding a WDR23-like polypeptide is by introducing and expressing in a plant a nucleic acid sequence encoding a WDR23-like polypeptide.

[0253] Any reference hereinafter to a “polypeptide useful in the methods of the invention” is taken to mean a WDR23-like polypeptide as defined herein. Any reference hereinafter to a “nucleic acid sequence useful in the methods of the invention” is taken to mean a nucleic acid sequence capable of encoding such a WDR23-like polypeptide. The nucleic acid sequence to be introduced into a plant (and therefore useful in performing the methods of the invention) is any nucleic acid sequence encoding the type of polypeptide, which will now be described, hereafter also named “WDR23-like nucleic acid sequence” or “WDR23-like gene”.

[0254] A “WDR23-like polypeptide” as defined herein refers to any polypeptide comprising a domain having at least 65%, 70%, 75%, 80%, 85%, 90%, 95%, 98%, 99% or more amino acid sequence identity to a Conserved Domain (CD) as represented by SEQ ID NO: 271.

[0255] Alternatively or additionally, a “WDR23-like polypeptide” as defined herein refers to any polypeptide comprising: (i) at least four WD40 repeats with a PFAM accession PF00400; and (ii) at least two conserved DxR motifs at the end of two consecutive WD40 repeats.

[0256] Alternatively or additionally, a “WDR23-like polypeptide” as defined herein refers to any polypeptide having, in increasing order of preference, at least 50%, 55%, 60%, 65%, 70%, 75%, 80%, 85%, 90%, 95%, 98%, 99% or more amino acid sequence identity to the WDR23-like polypeptide as represented by SEQ ID NO: 216 or to any of the polypeptide sequences given in Table A herein.

[0257] Analysis of the polypeptide sequence of SEQ ID NO: 216 is presented below in Example 4 herein. For example, a WDR23-like polypeptide as represented by SEQ ID NO: 216 comprises at least four WD40 repeats with a PFAM accession PF00400. Domains may also be identified using routine techniques, such as by sequence alignment. An alignment of the full length polypeptides of Table A herein, is shown in FIG. 23. Such alignments are useful for identifying the most conserved domains between the WDR23-like polypeptides, such as the conserved Domain (CD) as represented by SEQ ID NO: 271 (comprised in SEQ ID NO: 216).

[0258] Methods for the alignment of sequences for comparison are well known in the art, such methods include GAP, BESTFIT, BLAST, FASTA and TFASTA. GAP uses the algorithm of Needleman and Wunsch ((1970) J Mol Biol 48: 443-453) to find the global (i.e. spanning the complete sequences) alignment of two sequences that maximizes the number of matches and minimizes the number of gaps. The BLAST algorithm (Altschul et al. (1990) J Mol Biol 215: 403-10) calculates percent sequence identity and performs a statistical analysis of the similarity between the two sequences. The software for performing BLAST analysis is publicly available through the National Centre for Biotechnology Information (NCBI). Homologues may readily be identified using, for example, the ClustalW multiple sequence alignment algorithm (version 1.83), with the default pairwise alignment parameters, and a scoring method in percentage. Global percentages of similarity and identity may also be determined using one of the methods available in the MatGAT software package (Campanella et al., (2003) BMC Bioinformatics, 10: 29. MatGAT: an application that generates similarity/identity matrices using protein or DNA sequences). Minor manual editing may be performed to optimise alignment between conserved motifs, as would be apparent to a person skilled in the art. Furthermore, instead of using full-length sequences for the identification of homologues, specific domains may also be used. The sequence identity values may be determined over the entire nucleic acid sequence or polypeptide sequence or over selected domains or conserved motif(s), using the programs mentioned above using the default parameters. Example 3 herein describes in Table B the percentage identity between the WDR23-like polypeptide as represented by SEQ ID NO: 216 and the full length WDR23-like polypeptides listed in Table A, which can be as low as 54% amino acid sequence identity. The percentage identity can be increased to 69% if the identity calculation is performed between the Conserved Domain (CD) as represented by SEQ ID NO: 271 (comprised in SEQ ID NO: 216) and the Conserved Domain of the WDR23-like polypeptides of Table A and represented in FIG. 23. The results of such calculations are presented in Table B of the present application.

[0259] The task of protein subcellular localisation prediction is important and well studied. Knowing a protein's localisation helps elucidate its function. Experimental methods for protein localization range from immunolocalization to tagging of proteins using green fluorescent protein (GFP) or beta-glucuronidase (GUS). Such methods are accurate although labor-intensive compared with computational methods. Recently much progress has been made in computational prediction of protein localisation from sequence data. Among algorithms well known to a person skilled in the art are available at the ExPASy Proteomics tools hosted by the Swiss Institute for Bioinformatics, for example, PSort, TargetP, ChloroP, LocTree, Predotar, LipoP, MITOPROT, PATS, PTS1, SignalP, TMHMM, and others.

[0260] Furthermore, WDR23-like polypeptides useful in the methods of the present invention (at least in their native form) typically are capable of interacting with other polypeptides, through their WD40 repeat motifs. Many assays exist to protein-protein activity, such as yeast two-hybrid assays, tandem-affinity purification (TAP) followed by mass spectrometry, co-affinity purification, etc.

[0261] High-ranking hits are those having a low E-value. The lower the E-value, the more significant the score (or in other words the lower the chance that the hit was found by chance). Computation of the E-value is well known in the art. In addition to E-values, comparisons are also scored by percentage identity. Percentage identity refers to the number of identical nucleotides (or amino acids) between the two compared nucleic acid (or polypeptide) sequences over a particular length. In the case of large families, ClustalW may be used, followed by a neighbour joining tree, to help visualize clustering of related genes and to identify orthologues and paralogues.

[0262] Nucleic acid variants may also be useful in practising the methods of the invention. Examples of such variants include nucleic acids encoding homologues and derivatives of any one of the amino acid sequences given in Table A of Example 1, the terms “homologue” and “derivative” being as defined herein. Also useful in the methods of the invention are nucleic acids encoding homologues and derivatives of orthologues or paralogues of any one of the amino acid sequences given in Table A of Example 1. Homologues and derivatives useful in the methods of the present invention have substantially the same biological and functional activity as the unmodified protein from which they are derived.

[0263] Further nucleic acid variants useful in practising the methods of the invention include portions of nucleic acids encoding PATL, or PRP38, or GATA-like or ADA2, or WDR23-like polypeptides polypeptides, nucleic acids hybridising to nucleic acids encoding PATL, or PRP38, or GATA-like or ADA2, or WDR23-like polypeptides polypeptides, splice variants of nucleic acids encoding PATL, or PRP38, or GATA-like or ADA2, or WDR23-like polypeptides polypeptides, allelic variants of nucleic acids encoding PATL, or PRP38, or GATA-like or ADA2, or WDR23-like polypeptides polypeptides and variants of nucleic acids encoding PATL, or PRP38, or GATA-like or ADA2, or WDR23-like polypeptides polypeptides obtained by gene shuffling. The terms hybridising sequence, splice variant, allelic variant and gene shuffling are as described herein.

[0264] Nucleic acids encoding PATL, or PRP38, or GATA-like or ADA2, or WDR23-like polypeptides polypeptides need not be full-length nucleic acids, since performance of the methods of the invention does not rely on the use of full-length nucleic acid sequences. According to the present invention, there is provided a method for enhancing yield-related traits in plants, comprising introducing and expressing in a plant a portion of any one of the nucleic acid sequences given in Table A of Example 1, or a portion of a nucleic acid encoding an orthologue, paralogue or homologue of any of the amino acid sequences given in Table A of Example 1.

[0265] A portion of a nucleic acid may be prepared, for example, by making one or more deletions to the nucleic acid. The portions may be used in isolated form or they may be fused to other coding (or non-coding) sequences in order to, for example, produce a protein that combines several activities. When fused to other coding sequences, the resultant polypeptide produced upon translation may be bigger than that predicted for the protein portion.

[0266] Portions useful in the methods of the invention, encode a PATL, or PRP38, or ADA2 polypeptide as defined herein, and have substantially the same biological activity as the amino acid sequences given in Table A of Example 1. Portions useful in the methods of the invention comprise a protein domain having in increasing order of preference 50%, 55%, 60%, 70%, 75%, 80%, 85%, 90%, 92%, 93%, 95%, 96%; 98% or more sequence identity to any one of the conserved domains defined in Table C. Preferably, the portion is a portion of any one of the nucleic acids given in Table A of Example 1, or is a portion of a nucleic acid encoding an orthologue or paralogue of any one of the amino acid sequences given in Table A of Example 1. Preferably the portion is at least 50, 100, 150, 200, 300, 400, 500, 550, 600, 650, 700, 750, 800, 850, 900, 950, 1000, 1200 or more consecutive nucleotides in length, the consecutive nucleotides being of any one of the nucleic acid sequences given in Table A of Example 1, or of a nucleic acid encoding an orthologue or paralogue of any one of the amino acid sequences given in Table A of Example 1. Preferably, the portion encodes a fragment of an amino acid sequence which, when used in the construction of a phylogenetic tree, such as the one depicted in FIG. 3, clusters with any of the sequences in the tree, more preferably with the sequences in group Ia which comprises SEQ ID NO: 2. Further preferably, the portion is a portion of the nucleic acid of SEQ ID NO: 76, most preferably is portion as represented by SEQ ID NO: 82. Preferably, the portion encodes a fragment of an amino acid sequence which, when used in the construction of a phylogenetic tree, such as the one depicted in FIG. 8, clusters with any of the sequences in group Ib, which comprises SEQ ID NO: 77.

[0267] Concerning GATA-like polypeptides, portions useful in the methods of the invention, encode a GATA-like polypeptide as defined herein, and have substantially the same biological activity as the amino acid sequences given in Table A of Example 1. Preferably, the portion is a portion of any one of the nucleic acids given in Table A of Example 1, or is a portion of a nucleic acid encoding an orthologue or paralogue of any one of the amino acid sequences given in Table A of Example 1. Preferably the portion is at least 500, 550, 600, 650, 700, 750, 800, 850, 900, 950, 1000, 1050 consecutive nucleotides in length, the consecutive nucleotides being of any one of the nucleic acid sequences given in Table A of Example 1, or of a nucleic acid encoding an orthologue or paralogue of any one of the amino acid sequences given in Table A of Example 1. Most preferably the portion is a portion of the nucleic acid of SEQ ID NO: 128. Preferably, the portion encodes a fragment of an amino acid sequence which, when used in the construction of a phylogenetic tree, such as the one depicted in FIG. 11 or FIG. 14 in Reyes et al. (2004), clusters with the “Subfamily II” group of GATA-like polypeptides as defined in Reyes et al. (2004), comprising the amino acid sequence represented by SEQ ID NO: 129, rather than with any other group.

[0268] Portions useful in the methods of the invention, encode a WDR23-like polypeptide as defined herein, and have substantially the same biological activity as the polypeptide sequences given in Table A of Example 1. Preferably, the portion is a portion of any one of the nucleic acid sequences given in Table A of Example 1, or is a portion of a nucleic acid sequence encoding an orthologue or paralogue of any one of the polypeptide sequences given in Table A of Example 1. Preferably the portion is, in increasing order of preference at least 400, 450, 500, 550, 600, 650, 700, 750, 800, 850, 900, 950, 1000, 1050, 1100, 1150, 1200, 1250, 1300, 1350, 1400, 1450, 1480 or more consecutive nucleotides in length, the consecutive nucleotides being of any one of the nucleic acid sequences given in Table A of Example 1, or of a nucleic acid sequence encoding an orthologue or paralogue of any one of the polypeptide sequences given in Table A of Example 1. Preferably, the portion is a portion of a nucleic sequence encoding a polypeptide sequence polypeptide comprising a domain having at least 65%, 70%, 75%, 80%, 85%, 90%, 95%, 98%, 99% or more amino acid sequence identity to a Conserved Domain (CD) as represented by SEQ ID NO: 271. Most preferably, the portion is a portion of the nucleic acid sequence of SEQ ID NO: 215.

[0269] Another nucleic acid variant useful in the methods of the invention is a nucleic acid capable of hybridising, under reduced stringency conditions, preferably under stringent conditions, with a nucleic acid encoding a PATL, or PRP38, or GATA-like, or ADA2, or WDR23-like polypeptide as defined herein, or with a portion there of as defined herein.

[0270] According to the present invention, there is provided a method for enhancing yield-related traits in plants, comprising introducing and expressing in a plant a nucleic acid capable of hybridizing to any one of the nucleic acids given in Table A of Example 1, or comprising introducing and expressing in a plant a nucleic acid capable of hybridising to a nucleic acid encoding an orthologue, paralogue or homologue of any of the nucleic acid sequences given in Table A of Example 1.

[0271] Hybridising sequences useful in the methods of the invention encode a PATL, or PRP38, or GATA-like, or ADA2, or WDR23-like polypeptide as defined herein, having substantially the same biological activity as the amino acid sequences given in Table A of Example 1. Preferably, the hybridising sequence is capable of hybridising to any one of the nucleic acids given in Table A of Example 1, or to a portion of any of these sequences, a portion being as defined above, or the hybridising sequence is capable of hybridising to a nucleic acid encoding an orthologue or paralogue of any one of the amino acid sequences given in Table A of Example 1. Most preferably, the hybridising sequence is capable of hybridising to a nucleic acid as represented by SEQ ID NO: 1 or to a portion thereof or to SEQ ID NO: 76 or to a portion thereof, or to SEQ ID NO: 128 or to a portion thereof, or to SEQ ID NO: 181 or to a portion thereof. Concerning the WDR23-like sequences, preferably, the hybridising sequence is capable of hybridising to a nucleic acid sequence encoding a polypeptide sequence comprising a domain having at least 65%, 70%, 75%, 80%, 85%, 90%, 95%, 98%, 99% or more amino acid sequence identity to a Conserved Domain (CD) as represented by SEQ ID NO: 271. Most preferably, the hybridising sequence is capable of hybridising to a nucleic acid sequence as represented by SEQ ID NO: 215 or to a portion thereof.

[0272] Preferably, the hybridising sequence encodes a polypeptide with an amino acid sequence which, when full-length and used in the construction of a phylogenetic tree, such as the one depicted in FIG. 3, clusters with any of the sequences in the tree, more preferably with the sequences in group Ia which comprises SEQ ID NO: 2 or as the one depicted in FIG. 8, clusters with any of the sequences in group Ib, which comprises SEQ ID NO: 77. Also preferably, the hybridising sequence encodes a polypeptide with an amino acid sequence which, when full-length and used in the construction of a phylogenetic tree, such as the one depicted in FIG. 11 or FIG. 14 in Reyes et al. (2004), clusters with the “Subfamily II” group of GATA-like polypeptides as defined in Reyes et al. (2004), comprising the amino acid sequence represented by SEQ ID NO: 129, rather than with any other group.

[0273] Another nucleic acid variant useful in the methods of the invention is a splice variant encoding a PATL, or PRP38, or GATA-like, or ADA2, or WDR23-like polypeptide as defined hereinabove, a splice variant being as defined herein.

[0274] According to the present invention, there is provided a method for enhancing yield-related traits in plants, comprising introducing and expressing in a plant a splice variant of any one of the nucleic acid sequences given in Table A of Example 1, or a splice variant of a nucleic acid encoding an orthologue, paralogue or homologue of any of the amino acid sequences given in Table A of Example 1.

[0275] Preferred splice variants are splice variants of a nucleic acid represented by SEQ ID NO: 1, or a splice variant of a nucleic acid encoding an orthologue or paralogue of SEQ ID NO: 2. More preferably the splice variant is a variant of SEQ ID NO: 1. Preferably, the amino acid sequence encoded by the splice variant, when used in the construction of a phylogenetic tree, such as the one depicted in FIG. 3, clusters with any of the sequences in the tree, more preferably with the sequences in group Ia which comprises SEQ ID NO: 2.

[0276] Other preferred splice variants are splice variants of a nucleic acid represented by SEQ ID NO: 76, or a splice variant of a nucleic acid encoding an orthologue or paralogue of SEQ ID NO: 77. More preferably the splice variant is a variant of SEQ ID NO: 76, most preferably is a splice variant as represented by SEQ ID NO: 80. Preferably, the amino acid sequence encoded by the splice variant, when used in the construction of a phylogenetic tree, such as the one depicted in FIG. 8, clusters with any of the sequences in group Ib, which comprises SEQ ID NO: 77.

[0277] More preferred splice variants are splice variants of a nucleic acid represented by SEQ ID NO: 128, or a splice variant of a nucleic acid encoding an orthologue or paralogue of SEQ ID NO: 129. Preferably, the amino acid sequence encoded by the splice variant, when used in the construction of a phylogenetic tree, such as the one depicted in FIG. 11 or FIG. 14 in Reyes et al. (2004), clusters with the “Subfamily II” group of GATA-like polypeptides as defined in Reyes et al. (2004), comprising the amino acid sequence represented by SEQ ID NO: 129, rather than with any other group.

[0278] Further preferred splice variants are splice variants of a nucleic acid represented by SEQ ID NO: 181, or a splice variant of a nucleic acid encoding an orthologue or paralogue of SEQ ID NO: 182. More preferably the splice variant is a variant of SEQ ID NO: 181. Preferably, the amino acid sequence encoded by the splice variant, when used in the construction of a phylogenetic tree, such as the one depicted in FIG. 17, clusters with any of the sequences in the tree, more preferably with the sequences in group Id which comprises SEQ ID NO: 182.

[0279] The human ortholog WRD23 is present as multiple isoforms (NCBI accession AK057636.1), so that splice variants are also predicted for plant nucleic acid sequences encoding WRD23-like polypeptides.

[0280] Concerning the WDR23-like sequences, preferred splice variants are splice variants of a nucleic acid sequence represented by SEQ ID NO: 215, or a splice variant of a nucleic acid sequence encoding an orthologue or paralogue of SEQ ID NO: 216. Preferably, the splice variant is a splice variant of a nucleic acid sequence encoding a polypeptide sequence comprising a domain having at least 65%, 70%, 75%, 80%, 85%, 90%, 95%, 98%, 99% or more amino acid sequence identity to a Conserved Domain (CD) as represented by SEQ ID NO: 271.

[0281] Another nucleic acid variant useful in performing the methods of the invention is an allelic variant of a nucleic acid encoding a PATL, or PRP38, or GATA-like, or ADA2, or WDR23-like polypeptide as defined hereinabove, an allelic variant being as defined herein.

[0282] According to the present invention, there is provided a method for enhancing yield-related traits in plants, comprising introducing and expressing in a plant an allelic variant of any one of the nucleic acids given in Table A of Example 1, or comprising introducing and expressing in a plant an allelic variant of a nucleic acid encoding an orthologue, paralogue or homologue of any of the amino acid sequences given in Table A of Example 1.

[0283] The allelic variants useful in the methods of the present invention have substantially the same biological activity as the PATL polypeptide of SEQ ID NO: 2 and any of the amino acids depicted in Table A of Example 1. Allelic variants exist in nature, and encompassed within the methods of the present invention is the use of these natural alleles. Preferably, the allelic variant is an allelic variant of SEQ ID NO: 1 or an allelic variant of a nucleic acid encoding an orthologue or paralogue of SEQ ID NO: 2. Preferably, the amino acid sequence encoded by the allelic variant, when used in the construction of a phylogenetic tree, such as the one depicted in FIG. 3, clusters with any of the sequences in the tree, more preferably with the sequences in group Ia which comprises SEQ ID NO: 2.

[0284] Other allelic variants useful in the methods of the present invention have substantially the same biological activity as the PRP38 polypeptide of SEQ ID NO: 77 and any of the amino acids depicted in Table A of Example 1. Allelic variants exist in nature, and encompassed within the methods of the present invention is the use of these natural alleles. Preferably, the allelic variant is an allelic variant of SEQ ID NO: 76 or an allelic variant of a nucleic acid encoding an orthologue or paralogue of SEQ ID NO: 77. Preferably, the amino acid sequence encoded by the allelic variant, when used in the construction of a phylogenetic tree, such as the one depicted in FIG. 8, clusters with any of the sequences in group Ib, which comprises SEQ ID NO: 77.

[0285] Concerning the GATA-like polypeptides, the allelic variants useful in the methods of the present invention have substantially the same biological activity as the GATA-like polypeptide of SEQ ID NO: 129 and any of the amino acids depicted in Table A of Example 1. Allelic variants exist in nature, and encompassed within the methods of the present invention is the use of these natural alleles.

[0286] Preferably, the allelic variant is an allelic variant of SEQ ID NO: 128 or an allelic variant of a nucleic acid encoding an orthologue or paralogue of SEQ ID NO: 129. Preferably, the amino acid sequence encoded by the allelic variant, when used in the construction of a phylogenetic tree, such as the one depicted in FIG. 11 or FIG. 14 in Reyes et al. (2004), clusters with the “Subfamily II” group of GATA-like polypeptides as defined in Reyes et al. (2004), comprising the amino acid sequence represented by SEQ ID NO: 129, rather than with any other group.

[0287] Concerning ADA2 polypeptides, the allelic variants useful in the methods of the present invention have substantially the same biological activity as the ADA2 polypeptide of SEQ ID NO: 182 and any of the amino acids depicted in Table A of Example 1. Allelic variants exist in nature, and encompassed within the methods of the present invention is the use of these natural alleles. Preferably, the allelic variant is an allelic variant of SEQ ID NO: 181 or an allelic variant of a nucleic acid encoding an orthologue or paralogue of SEQ ID NO: 182. Preferably, the amino acid sequence encoded by the allelic variant, when used in the construction of a phylogenetic tree, such as the one depicted in FIG. 17, clusters with any of the sequences in the tree, more preferably with the sequences in group Id which comprises SEQ ID NO: 182.

[0288] Concerning WDR23-like polypeptides, the allelic variants useful in the methods of the present invention have substantially the same biological activity as the WDR23-like polypeptide of SEQ ID NO: 216 and any of the polypeptide sequences depicted in Table A of Example 1. Allelic variants exist in nature, and encompassed within the methods of the present invention is the use of these natural alleles. Preferably, the allelic variant is an allelic variant of SEQ ID NO: 215 or an allelic variant of a nucleic acid sequence encoding an orthologue or paralogue of SEQ ID NO: 216. Preferably, the allelic variant is an allelic variant of a polypeptide sequence comprising a domain having at least 65%, 70%, 75%, 80%, 85%, 90%, 95%, 98%, 99% or more amino acid sequence identity to a Conserved Domain (CD) as represented by SEQ ID NO: 271.

[0289] Gene shuffling or directed evolution may also be used to generate variants of nucleic acids encoding PATL, or PRP38, or GATA-like, or ADA2, or WDR23-like polypeptides as defined above; the term “gene shuffling” being as defined herein.

[0290] According to the present invention, there is provided a method for enhancing yield-related traits in plants, comprising introducing and expressing in a plant a variant of any one of the nucleic acid sequences given in Table A of Example 1, or comprising introducing and expressing in a plant a variant of a nucleic acid encoding an orthologue, paralogue or homologue of any of the amino acid sequences given in Table A of Example 1, which variant nucleic acid is obtained by gene shuffling.

[0291] Preferably, the amino acid sequence encoded by the variant nucleic acid obtained by gene shuffling, when used in the construction of a phylogenetic tree such as the one depicted in FIG. 3, clusters with any of the sequences in the tree, more preferably with the sequences in group Ia which comprises SEQ ID NO: 2, or SEQ ID NO: 77. Also preferably, the amino acid sequence encoded by the variant nucleic acid obtained by gene shuffling, when used in the construction of a phylogenetic tree such as the one depicted in FIG. 11 or FIG. 14 in Reyes et al. (2004), clusters with the “Subfamily II” group of GATA-like polypeptides as defined in Reyes et al. (2004), comprising the amino acid sequence represented by SEQ ID NO: 129, rather than with any other group. Concerning ADA2, preferably, the amino acid sequence encoded by the variant nucleic acid obtained by gene shuffling, when used in the construction of a phylogenetic tree such as the one depicted in FIG. 17, clusters with any of the sequences in the tree, more preferably with the sequences in group Id which comprises SEQ ID NO: 182. Concerning WDR23, the variant nucleic acid sequence obtained by gene shuffling encodes a polypeptide sequence comprising a domain having at least 65%, 70%, 75%, 80%, 85%, 90%, 95%, 98%, 99% or more amino acid sequence identity to a Conserved Domain (CD) as represented by SEQ ID NO: 271.

[0292] Furthermore, nucleic acid variants may also be obtained by site-directed mutagenesis. Several methods are available to achieve site-directed mutagenesis, the most common being PCR based methods (Current Protocols in Molecular Biology. Wiley Eds.).

[0293] Nucleic acids encoding PATL, or PRP38, or GATA-like, or ADA2 polypeptides may be derived from any natural or artificial source. The nucleic acid may be modified from its native form in composition and/or genomic environment through deliberate human manipulation. Preferably the PATL, or the GATA-like polypeptide-encoding nucleic acid is from a plant, further preferably from a monocotyledonous plant, more preferably from the family poaceae, most preferably the nucleic acid is from Oryza sativa. Preferably the PRP38 polypeptide-encoding nucleic acid is from a plant, further preferably from a dicotyledonous plant, more preferably from the family brasicaceae, most preferably the nucleic acid is from Arabidopsis thaliana. Preferably the ADA2 polypeptide-encoding nucleic acid is from a plant, further preferably from a dicotyledonous plant, more preferably from the family brasicaceae, most preferably the nucleic acid is from Arabidopsis thaliana. Nucleic acid sequences encoding WDR23-like polypeptides may be derived from any natural or artificial source. The nucleic acid sequence may be modified from its native form in composition and/or genomic environment through deliberate human manipulation. The nucleic acid sequence encoding a WDR23-like polypeptide is from the Eukaryota domain, preferably from the plant kingdom, further preferably from a dicotyledon plant. More preferably, the nucleic acid sequence encoding a WDR23-like polypeptide is from the Brassicaceae family, most preferably, the nucleic acid sequence is encoding a WDR23-like polypeptide is from Arabidopsis thaliana.

[0294] Advantageously, the present invention provides hitherto unknown PATL nucleic acids and polypeptide sequences.

[0295] According to a further embodiment of the present invention, there is provided an isolated nucleic acid molecule comprising:
[0296] (i) a nucleic acid represented by SEQ ID NO: 9; SEQ ID NO: 11; SEQ ID NO: 13; SEQ ID NO: 15; SEQ ID NO: 17; SEQ ID NO: 19; SEQ ID NO: 21; SEQ ID NO: 23; SEQ ID NO: 25 and SEQ ID NO: 27;
[0297] (ii) a nucleic acid or fragment thereof that is complementary to any one of the SEQ ID NOs given in (i);
[0298] (iii) a nucleic acid encoding a PATL polypeptide having, in increasing order of preference, at least 70%, 75%, 80%, 85%, 90%, 95%, 96%, 97%, 98%, 98% or more sequence identity to any one of the amino acid sequences given in SEQ ID NO: 10; SEQ ID NO: 12; SEQ ID NO: 14; SEQ ID NO: 16; SEQ ID NO: 18; SEQ ID NO: 20; SEQ ID NO: 22; SEQ ID NO: 24; SEQ ID NO: 26 and SEQ ID NO: 28;
[0299] (iv) a nucleic acid capable of hybridizing under stringent conditions to any one of the nucleic acids given in (i), (ii) or (iii) above.

[0300] According to a further embodiment of the present invention, there is therefore provided an isolated polypeptide comprising:
[0301] (i) an amino acid sequence having, in increasing order of preference, at least 80%, 85%, 90%, 95%, 96%, 97%, 98%, 99% or 100% sequence identity to any one of the amino acid sequences given in SEQ ID NO: 10; SEQ ID NO: 12; SEQ ID NO: 14; SEQ ID NO: 16; SEQ ID NO: 18; SEQ ID NO: 20; SEQ ID NO: 22; SEQ ID NO: 24; SEQ ID NO: 26 and SEQ ID NO: 28;
[0302] (ii) derivatives of any of the amino acid sequences given in (i).

[0303] Performance of the methods of the invention gives plants having enhanced yield-related traits. In particular performance of the methods of the invention gives plants having increased yield, especially increased seed yield relative to control plants. The terms “yield” and “seed yield” are described in more detail in the “definitions” section herein.

[0304] Reference herein to enhanced yield-related traits is taken to mean an increase in biomass (weight) of one or more parts of a plant, which may include aboveground (harvestable) parts and/or (harvestable) parts below ground. In particular, such harvestable parts are seeds, and performance of the methods of the invention results in plants having increased seed yield relative to the seed yield of control plants.

[0305] Taking corn as an example, a yield increase may be manifested as one or more of the following: increase in the number of plants established per square meter, an increase in the number of ears per plant, an increase in the number of rows, number of kernels per row, kernel weight, thousand kernel weight, ear length/diameter, increase in the seed filling rate (which is the number of filled seeds divided by the total number of seeds and multiplied by 100), among others. Taking rice as an example, a yield increase may manifest itself as an increase in one or more of the following: number of plants per square meter, number of panicles per plant, number of spikelets per panicle, number of flowers (florets) per panicle (which is expressed as a ratio of the number of filled seeds over the number of primary panicles), increase in the seed filling rate (which is the number of filled seeds divided by the total number of seeds and multiplied by 100), increase in thousand kernel weight, among others.

[0306] The present invention provides a method for increasing yield, especially seed yield of plants, relative to control plants, which method comprises modulating expression in a plant of a nucleic acid encoding a PATL, or PRP38, or a GATA-like, or ADA2, or a WDR23-like polypeptide as defined herein.

[0307] Since the transgenic plants according to the present invention have increased yield, it is likely that these plants exhibit an increased growth rate (during at least part of their life cycle), relative to the growth rate of control plants at a corresponding stage in their life cycle.

[0308] The increased growth rate may be specific to one or more parts of a plant (including seeds), or may be throughout substantially the whole plant. Plants having an increased growth rate may have a shorter life cycle. The life cycle of a plant may be taken to mean the time needed to grow from a dry mature seed up to the stage where the plant has produced dry mature seeds, similar to the starting material. This life cycle may be influenced by factors such as early vigour, growth rate, greenness index, flowering time and speed of seed maturation. The increase in growth rate may take place at one or more stages in the life cycle of a plant or during substantially the whole plant life cycle. Increased growth rate during the early stages in the life cycle of a plant may reflect enhanced vigour. The increase in growth rate may alter the harvest cycle of a plant allowing plants to be sown later and/or harvested sooner than would otherwise be possible (a similar effect may be obtained with earlier flowering time). If the growth rate is sufficiently increased, it may allow for the further sowing of seeds of the same plant species (for example sowing and harvesting of rice plants followed by sowing and harvesting of further rice plants all within one conventional growing period). Similarly, if the growth rate is sufficiently increased, it may allow for the further sowing of seeds of different plants species (for example the sowing and harvesting of corn plants followed by, for example, the sowing and optional harvesting of soybean, potato or any other suitable plant). Harvesting additional times from the same rootstock in the case of some crop plants may also be possible. Altering the harvest cycle of a plant may lead to an increase in annual biomass production per square meter (due to an increase in the number of times (say in a year) that any particular plant may be grown and harvested). An increase in growth rate may also allow for the cultivation of transgenic plants in a wider geographical area than their wild-type counterparts, since the territorial limitations for growing a crop are often determined by adverse environmental conditions either at the time of planting (early season) or at the time of harvesting (late season). Such adverse conditions may be avoided if the harvest cycle is shortened. The growth rate may be determined by deriving various parameters from growth curves, such parameters may be: T-Mid (the time taken for plants to reach 50% of their maximal size) and T-90 (time taken for plants to reach 90% of their maximal size), amongst others.

[0309] According to a preferred feature of the present invention, performance of the methods of the invention gives plants having an increased growth rate relative to control plants. Therefore, according to the present invention, there is provided a method for increasing the growth rate of plants, which method comprises modulating expression in a plant of a nucleic acid encoding a PATL, or PRP38, or a GATA-like, or ADA2, or a WDR23-like polypeptide as defined herein.

[0310] An increase in yield and/or growth rate occurs under typical agricultural growth conditions which comprise the everyday stresses to which plants are exposed. Plants typically respond to exposure to stress by growing more slowly. In conditions of severe stress, the plant may even stop growing altogether. Mild or everyday stresses on the other hand are stresses to which a plant is exposed which does not result in the plant ceasing to grow altogether without the capacity to resume growth. Mild stress in the sense of the invention leads to a reduction in the growth of the stressed plants of less than 40%, 35% or 30%, preferably less than 25%, 20% or 15%, more preferably less than 14%, 13%, 12%, 11% or 10% or less in comparison to the control plant under non-stress conditions. Due to advances in agricultural practices (irrigation, fertilization, pesticide treatments) severe stresses are not often encountered in cultivated crop plants. A plant cultivated under typical agricultural conditions may often encounter mild stresses. As a consequence, the compromised growth induced by mild stress is often an undesirable feature for agriculture. Mild stresses are the everyday biotic and/or abiotic (environmental) stresses to which a plant is exposed. Abiotic stresses may be due to drought or excess water, anaerobic stress, salt stress, chemical toxicity, oxidative stress and hot, cold or freezing temperatures. The abiotic stress may be an osmotic stress caused by a water stress (particularly due to drought), salt stress, oxidative stress or an ionic stress.

[0311] Concerning the GATA-like, an increase in yield and/or growth rate occurs whether the plant is under non-stress conditions or whether the plant is exposed to various stresses compared to control plants. Concerning, WDR23, ncreased yield-related traits occur whether the plant is under non-stress conditions or whether the plant is exposed to various stresses compared to control plants grown under comparable conditions.Plants typically respond to exposure to stress by growing more slowly. In conditions of severe stress, the plant may even stop growing altogether. Mild stress on the other hand is defined herein as being any stress to which a plant is exposed which does not result in the plant ceasing to grow altogether without the capacity to resume growth. Mild stress in the sense of the invention leads to a reduction in the growth of the stressed plants of less than 40%, 35% or 30%, preferably less than 25%, 20% or 15%, more preferably less than 14%, 13%, 12%, 11% or 10% or less in comparison to the control plant under non-stress conditions. Due to advances in agricultural practices (irrigation, fertilization, pesticide treatments) severe stresses are not often encountered in cultivated crop plants. As a consequence, the compromised growth induced by mild stress is often an undesirable feature for agriculture. Mild stresses are the everyday biotic and/or abiotic (environmental) stresses to which a plant is exposed. Abiotic stresses may be due to drought or excess water, anaerobic stress, salt stress, chemical toxicity, oxidative stress and hot, cold or freezing temperatures. Biotic stresses are typically those stresses caused by pathogens, such as bacteria, viruses, fungi, nematodes, and insects. The term “non-stress” conditions as used herein are those environmental conditions that allow optimal growth of plants. Persons skilled in the art are aware of normal soil conditions and climatic conditions for a given location.

[0312] In particular, the methods of the present invention may be performed under non-stress conditions or under conditions of mild drought to give plants having increased yield relative to control plants. As reported in Wang et al. (Planta (2003) 218: 1-14), abiotic stress leads to a series of morphological, physiological, biochemical and molecular changes that adversely affect plant growth and productivity. Drought, salinity, extreme temperatures and oxidative stress are known to be interconnected and may induce growth and cellular damage through similar mechanisms. Rabbani et al. (Plant Physiol (2003) 133: 1755-1767) describes a particularly high degree of “cross talk” between drought stress and high-salinity stress. For example, drought and/or salinisation are manifested primarily as osmotic stress, resulting in the disruption of homeostasis and ion distribution in the cell. Oxidative stress, which frequently accompanies high or low temperature, salinity or drought stress, may cause denaturing of functional and structural proteins. As a consequence, these diverse environmental stresses often activate similar cell signalling pathways and cellular responses, such as the production of stress proteins, up-regulation of anti-oxidants, accumulation of compatible solutes and growth arrest. The term “non-stress” conditions are those environmental conditions that allow optimal growth of plants. Persons skilled in the art are aware of normal soil conditions and climatic conditions for a given location. The term non-stress conditions as used herein, encompasses the occasional or everyday mild stresses to which a plant is exposed, as defined herein, but does not encompass severe stresses.

[0313] Performance of the methods of the invention gives plants grown under non-stress conditions or under mild drought conditions increased yield relative to control plants grown under comparable conditions. Therefore, according to the present invention, there is provided a method for increasing yield in plants grown under non-stress conditions or under mild drought conditions, which method comprises modulating expression in a plant of a nucleic acid encoding a PATL, or PRP38, or a GATA-like, or ADA2, or a WDR23-like polypeptide.

[0314] Performance of the methods of the invention gives plants grown under conditions of nutrient deficiency, particularly under conditions of nitrogen deficiency, increased yield relative to control plants grown under comparable conditions. Therefore, according to the present invention, there is provided a method for increasing yield in plants grown under conditions of nutrient deficiency, which method comprises modulating expression in a plant of a nucleic acid encoding a PATL, or PRP38, or a GATA-like, or ADA2, or a WDR23-like polypeptide.

[0315] Nutrient deficiency may result from a lack of nutrients such as nitrogen, phosphates and other phosphorous-containing compounds, potassium, calcium, cadmium, magnesium, manganese, iron and boron, amongst others. Concerning WDR23, preferably, reduced nutrient availability is reduced nitrogen availability.

[0316] The present invention encompasses plants or parts thereof (including seeds) obtainable by the methods according to the present invention. The plants or parts thereof comprise a nucleic acid transgene encoding a PATL, or PRP38, or a GATA-like, or ADA2, or a WDR23-like polypeptide as defined above.

[0317] The invention also provides genetic constructs and vectors to facilitate introduction and/or expression in plants of nucleic acids encoding PATL, or PRP38, or a GATA-like, or ADA2, or a WDR23-like polypeptides. The gene constructs may be inserted into vectors, which may be commercially available, suitable for transforming into plants and suitable for expression of the gene of interest in the transformed cells. The invention also provides use of a gene construct as defined herein in the methods of the invention.

[0318] More specifically, the present invention provides a construct comprising:
[0319] (a) a nucleic acid encoding a PATL, or PRP38, or a GATA-like, or ADA2, or a WDR23-like polypeptide as defined above;
[0320] (b) one or more control sequences capable of driving expression of the nucleic acid sequence of (a); and optionally
[0321] (c) a transcription termination sequence.

[0322] Preferably, the nucleic acid encoding a PATL, or PRP38, or a GATA-like, or ADA2, or a WDR23-like polypeptide is as defined above. The term “control sequence” and “termination sequence” are as defined herein.

[0323] Concerning WDR23, preferably, one of the control sequences of a construct is a constitutive promoter isolated from a plant genome. An example of a plant constitutive promoter is a GOS2 promoter, more preferably a rice GOS2 promoter, most preferably a GOS2 promoter as represented by SEQ ID NO: 272. Alternatively, one of the control sequences of a construct is a meristem-specific promoter isolated from a plant genome. An example of a plant meristem-specific promoter is a metallothionein (MT) promoter, more preferably a rice MT promoter, most preferably an MT promoter as represented by SEQ ID NO: 273.

[0324] Plants are transformed with a vector comprising any of the nucleic acids described above. The skilled artisan is well aware of the genetic elements that must be present on the vector in order to successfully transform, select and propagate host cells containing the sequence of interest. The sequence of interest is operably linked to one or more control sequences (at least to a promoter).

[0325] Advantageously, any type of promoter, whether natural or synthetic, may be used to increase expression of the nucleic acid sequence. A constitutive promoter is particularly useful in the methods. Preferably the constitutive promoter is also a ubiquitous promoter. Concerning the GATA-like polypeptides, the promoter is of medium strength See the “Definitions” section herein for definitions of the various promoter types.

[0326] It should be clear that the applicability of the present invention is not restricted to the PATL polypeptide-encoding nucleic acid represented by SEQ ID NO: 1, nor is the applicability of the invention restricted to expression of a PATL polypeptide-encoding nucleic acid when driven by a constitutive promoter, or when driven by a green-tissue promoter.

[0327] Furthermore it should be clear that the applicability of the invention is not restricted to the PRP38 polypeptide-encoding nucleic acid represented by SEQ ID NO: 76, nor is the applicability of the invention restricted to expression of a PRP38 polypeptide-encoding nucleic acid when driven by a constitutive promoter, or when driven by a root-specific promoter.

[0328] Also, it should be clear that the applicability of the present invention is not restricted to the GATA-like polypeptide-encoding nucleic acid represented by SEQ ID NO: 128, nor is the applicability of the invention restricted to expression of a GATA-like polypeptide-encoding nucleic acid when driven by a constitutive promoter.

[0329] Also, it should be clear that the applicability of the present invention is not restricted to the ADA2 polypeptide-encoding nucleic acid represented by SEQ ID NO: 181, nor is the applicability of the invention restricted to expression of an ADA2 polypeptide-encoding nucleic acid when driven by a constitutive promoter, or when driven by a green-tissue promoter.

[0330] Also, it should be clear that the applicability of the present invention is not restricted to a nucleic acid sequence encoding the WDR23-like polypeptide, as represented by SEQ ID NO: 215, nor is the applicability of the invention restricted to expression of a WDR23-like polypeptide-encoding nucleic acid sequence when driven by a constitutive or meristem-specific promoter.

[0331] The constitutive promoter is preferably a HMG (high mobility group), also called HMGP promoter, preferably a HMG promoter from rice. Further preferably the constitutive promoter is represented by a nucleic acid sequence substantially similar to SEQ ID NO: 33, most preferably the constitutive promoter is as represented by SEQ ID NO: 33. The green tissue specific promoter is preferably a EXP9 (Expansin), also called EXP, also called HMGP promoter, preferably a EXP promoter from rice. Further preferably the green tissue specific is represented by a nucleic acid sequence substantially similar to SEQ ID NO: 34, most preferably the constitutive promoter is as represented by SEQ ID NO: 34. See Table 2 in the “Definitions” section herein for reference describing HMG and EXP promoter and for further examples of constitutive and green tissue specific promoters.

[0332] Concerning PRP38, the constitutive promoter is preferably a GOS2 promoter, preferably a GOS2 promoter from rice. Further preferably the constitutive promoter is represented by a nucleic acid sequence substantially similar to SEQ ID NO: 127, most preferably the constitutive promoter is as represented by SEQ ID NO: 127. See Table ii in the “Definitions” section herein for further examples of constitutive promoters.

[0333] Concerning the GATA-like polypeptides, the constitutive promoter is preferably a GOS2 promoter, preferably a GOS2 promoter from rice. Further preferably the constitutive promoter is represented by a nucleic acid sequence substantially similar to SEQ ID NO: 135 most preferably the constitutive promoter is as represented by SEQ ID NO: 135. Optionally, one or more terminator sequences may be used in the construct introduced into a plant. Preferably, the construct comprises an expression cassette essentially similar or identical to SEQ ID NO 136, comprising the GOS2 promoter and the nucleic acid encoding the GATA-like polypeptide of SEQ ID NO: 129.

[0334] Concerning ADA2 polypeptides, the constitutive promoter is preferably a HMG (high mobility group), also called HMGP promoter, preferably a HMG promoter from rice. Further preferably the constitutive promoter is represented by a nucleic acid sequence substantially similar to SEQ ID NO: 213, most preferably the constitutive promoter is as represented by SEQ ID NO: 213. The green tissue specific promoter is preferably a EXP9 (Expansin), also called EXP, also called HMGP promoter, preferably a EXP promoter from rice. Further preferably the green tissue specific is represented by a nucleic acid sequence substantially similar to SEQ ID NO: 214, most preferably the constitutive promoter is as represented by SEQ ID NO: 214. See Table iii in the “Definitions” section herein for reference describing HMG and EXP promoter and for further examples of constitutive and green tissue specific promoters.

[0335] Additional regulatory elements may include transcriptional as well as translational enhancers. Those skilled in the art will be aware of terminator and enhancer sequences that may be suitable for use in performing the invention. An intron sequence may also be added to the 5′ untranslated region (UTR) or in the coding sequence to increase the amount of the mature message that accumulates in the cytosol, as described in the definitions section. Other control sequences (besides promoter, enhancer, silencer, intron sequences, 3′UTR and/or 5′UTR regions) may be protein and/or RNA stabilizing elements. Such sequences would be known or may readily be obtained by a person skilled in the art.

[0336] The genetic constructs of the invention may further include an origin of replication sequence that is required for maintenance and/or replication in a specific cell type. One example is when a genetic construct is required to be maintained in a bacterial cell as an episomal genetic element (e.g. plasmid or cosmid molecule). Preferred origins of replication include, but are not limited to, the f1-ori and colE1.

[0337] For the detection of the successful transfer of the nucleic acid sequences as used in the methods of the invention and/or selection of transgenic plants comprising these nucleic acids, it is advantageous to use marker genes (or reporter genes). Therefore, the genetic construct may optionally comprise a selectable marker gene. Selectable markers are described in more detail in the “definitions” section herein. The marker genes may be removed or excised from the transgenic cell once they are no longer needed. Techniques for marker removal are known in the art, useful techniques are described above in the definitions section.

[0338] The invention also provides a method for the production of transgenic plants having enhanced yield-related traits relative to control plants, comprising introduction and expression in a plant of any nucleic acid encoding a PATL, or PRP38, or a GATA-like, or ADA2, or a WDR23-like polypeptide as defined hereinabove.

[0339] More specifically, the present invention provides a method for the production of transgenic plants having increased enhanced yield-related traits, particularly increased seed yield, which method comprises:
[0340] (i) introducing and expressing in a plant or plant cell a PATL, or PRP38, or ADA2 polypeptide-encoding nucleic acid; and
[0341] (ii) cultivating the plant cell under conditions promoting plant growth and development, and optionally
[0342] (iii) selecting for plants having enhanced yield-related traits

[0343] Concerning the GATA-like polypeptides, the present invention provides a method for the production of transgenic plants having increased enhanced yield-related traits, particularly increased TKW, which method comprises:
[0344] (i) introducing and expressing in a plant or plant cell a GATA-like polypeptide, or a WDR23-like polypeptide-encoding nucleic acid; and
[0345] (ii) cultivating the plant cell under conditions promoting plant growth and development.

[0346] The nucleic acid of (i) may be any of the nucleic acids capable of encoding a PATL, or PRP38, or a GATA-like, or ADA2, or a WDR23-like polypeptide as defined herein.

[0347] The nucleic acid may be introduced directly into a plant cell or into the plant itself (including introduction into a tissue, organ or any other part of a plant). According to a preferred feature of the present invention, the nucleic acid is preferably introduced into a plant by transformation. The term “transformation” is described in more detail in the “definitions” section herein.

[0348] The genetically modified plant cells can be regenerated via all methods with which the skilled worker is familiar. Suitable methods can be found in the abovementioned publications by S.D. Kung and R. Wu, Potrykus or Hofgen and Willmitzer.

[0349] Generally after transformation, plant cells or cell groupings are selected for the presence of one or more markers which are encoded by plant-expressible genes co-transferred with the gene of interest, following which the transformed material is regenerated into a whole plant. To select transformed plants, the plant material obtained in the transformation is, as a rule, subjected to selective conditions so that transformed plants can be distinguished from untransformed plants. For example, the seeds obtained in the above-described manner can be planted and, after an initial growing period, subjected to a suitable selection by spraying. A further possibility consists in growing the seeds, if appropriate after sterilization, on agar plates using a suitable selection agent so that only the transformed seeds can grow into plants. Alternatively, the transformed plants are screened for the presence of a selectable marker such as the ones described above.

[0350] Following DNA transfer and regeneration, putatively transformed plants may also be evaluated, for instance using Southern analysis, for the presence of the gene of interest, copy number and/or genomic organisation. Alternatively or additionally, expression levels of the newly introduced DNA may be monitored using Northern and/or Western analysis, both techniques being well known to persons having ordinary skill in the art.

[0351] The generated transformed plants may be propagated by a variety of means, such as by clonal propagation or classical breeding techniques. For example, a first generation (or T1) transformed plant may be selfed and homozygous second-generation (or T2) transformants selected, and the T2 plants may then further be propagated through classical breeding techniques. The generated transformed organisms may take a variety of forms. For example, they may be chimeras of transformed cells and non-transformed cells; clonal transformants (e.g., all cells transformed to contain the expression cassette); grafts of transformed and untransformed tissues (e.g., in plants, a transformed rootstock grafted to an untransformed scion).

[0352] The present invention clearly extends to any plant cell or plant produced by any of the methods described herein, and to all plant parts and propagules thereof. The present invention extends further to encompass the progeny of a primary transformed or transfected cell, tissue, organ or whole plant that has been produced by any of the aforementioned methods, the only requirement being that progeny exhibit the same genotypic and/or phenotypic characteristic(s) as those produced by the parent in the methods according to the invention.

[0353] The invention also includes host cells containing an isolated nucleic acid encoding a PATL, or PRP38, or a GATA-like, or ADA2, or a WDR23-like polypeptide as defined hereinabove. Preferred host cells according to the invention are plant cells. Host plants for the nucleic acids or the vector used in the method according to the invention, the expression cassette or construct or vector are, in principle, advantageously all plants, which are capable of synthesizing the polypeptides used in the inventive method.

[0354] The methods of the invention are advantageously applicable to any plant. Plants that are particularly useful in the methods of the invention include all plants which belong to the superfamily Viridiplantae, in particular monocotyledonous and dicotyledonous plants including fodder or forage legumes, ornamental plants, food crops, trees or shrubs. According to a preferred embodiment of the present invention, the plant is a crop plant. Examples of crop plants include soybean, sunflower, canola, alfalfa, rapeseed, cotton, tomato, potato and tobacco. Further preferably, the plant is a monocotyledonous plant. Examples of monocotyledonous plants include sugarcane. More preferably the plant is a cereal. Examples of cereals include rice, maize, wheat, barley, millet, rye, triticale, sorghum and oats.

[0355] The invention also extends to harvestable parts of a plant such as, but not limited to seeds, leaves, fruits, flowers, stems, roots, rhizomes, tubers and bulbs or also to an isolated nucleic acid sequence encoding a WDR23-like (as defined hereinabove) operably linked to a plant constitutive promoter. The invention furthermore relates to products derived, preferably directly derived, from a harvestable part of such a plant, such as dry pellets or powders, oil, fat and fatty acids, starch or proteins.

[0356] According to a preferred feature of the invention, the modulated expression is increased expression. Methods for increasing expression of nucleic acids or genes, or gene products, are well documented in the art and examples are provided in the definitions section.

[0357] As mentioned above, a preferred method for modulating expression of a nucleic acid encoding a PATL, or PRP38, or a GATA-like, or ADA2, or a WDR23-like polypeptide is by introducing and expressing in a plant a nucleic acid encoding a PATL, or PRP38, or a GATA-like, or ADA2, or a WDR23-like polypeptide; however the effects of performing the method, i.e. enhancing yield-related traits may also be achieved using other well known techniques, including but not limited to T-DNA activation tagging, TILLING, homologous recombination. A description of these techniques is provided in the definitions section.

[0358] The present invention also encompasses use of nucleic acids encoding PATL, or PRP38, or a GATA-like, or ADA2, or a WDR23-like polypeptides as described herein and use of these PATL, or PRP38, or a GATA-like, or ADA2, or a WDR23-like polypeptides in enhancing any of the aforementioned yield-related traits in plants, under normal growth conditions, under abiotic stress growth (preferably osmotic stress growth conditions) conditions, and under growth conditions of reduced nutrient availability, preferably under conditions of reduced nitrogen availability.

[0359] Nucleic acids encoding PATL, or PRP38, or a GATA-like, or ADA2, or a WDR23-like polypeptide described herein, or the PATL, or PRP38, or a GATA-like, or ADA2, or a WDR23-like polypeptides themselves, may find use in breeding programmes in which a DNA marker is identified which may be genetically linked to a PATL, or PRP38, or a GATA-like, or ADA2, or a WDR23-like polypeptide-encoding gene. The nucleic acids/genes, or the PATL, or PRP38, or a GATA-like, or ADA2, or a WDR23-like polypeptides themselves may be used to define a molecular marker. This DNA or protein marker may then be used in breeding programmes to select plants having enhanced yield-related traits as defined hereinabove in the methods of the invention.

[0360] Allelic variants of a PATL, or PRP38, or a GATA-like, or ADA2, or a WDR23-like polypeptide-encoding nucleic acid/gene may also find use in marker-assisted breeding programmes. Such breeding programmes sometimes require introduction of allelic variation by mutagenic treatment of the plants, using for example EMS mutagenesis; alternatively, the programme may start with a collection of allelic variants of so called “natural” origin caused unintentionally. Identification of allelic variants then takes place, for example, by PCR. This is followed by a step for selection of superior allelic variants of the sequence in question and which give increased yield. Selection is typically carried out by monitoring growth performance of plants containing different allelic variants of the sequence in question. Growth performance may be monitored in a greenhouse or in the field. Further optional steps include crossing plants in which the superior allelic variant was identified with another plant. This could be used, for example, to make a combination of interesting phenotypic features.

[0361] Nucleic acids encoding PATL, or PRP38, or a GATA-like, or ADA2, or a WDR23-like polypeptides may also be used as probes for genetically and physically mapping the genes that they are a part of, and as markers for traits linked to those genes. Such information may be useful in plant breeding in order to develop lines with desired phenotypes. Such use of PATL, or PRP38, or a GATA-like, or ADA2, or a WDR23-like polypeptide-encoding nucleic acids requires only a nucleic acid sequence of at least 15 nucleotides in length. The PATL, or PRP38, or a GATA-like, or ADA2, or a WDR23-like polypeptide-encoding nucleic acids may be used as restriction fragment length polymorphism (RFLP) markers. Southern blots (Sambrook J, Fritsch EF and Maniatis T (1989) Molecular Cloning, A Laboratory Manual) of restriction-digested plant genomic DNA may be probed with the PATL, or PRP38, or GATA-like, or ADA2, or a WDR23-like-encoding nucleic acids. The resulting banding patterns may then be subjected to genetic analyses using computer programs such as MapMaker (Lander et al. (1987) Genomics 1: 174-181) in order to construct a genetic map. In addition, the nucleic acids may be used to probe Southern blots containing restriction endonuclease-treated genomic DNAs of a set of individuals representing parent and progeny of a defined genetic cross. Segregation of the DNA polymorphisms is noted and used to calculate the position of the PATL, or PRP38, or a GATA-like, or ADA2, or a WDR23-like polypeptide-encoding nucleic acid in the genetic map previously obtained using this population (Botstein et al. (1980) Am. J. Hum. Genet. 32:314-331).

[0362] The production and use of plant gene-derived probes for use in genetic mapping is described in Bernatzky and Tanksley (1986) Plant Mol. Biol. Reporter 4: 37-41. Numerous publications describe genetic mapping of specific cDNA clones using the methodology outlined above or variations thereof. For example, F2 intercross populations, backcross populations, randomly mated populations, near isogenic lines, and other sets of individuals may be used for mapping. Such methodologies are well known to those skilled in the art.

[0363] The nucleic acid probes may also be used for physical mapping (i.e., placement of sequences on physical maps; see Hoheisel et al. In: Non-mammalian Genomic Analysis: A Practical Guide, Academic press 1996, pp. 319-346, and references cited therein).

[0364] In another embodiment, the nucleic acid probes may be used in direct fluorescence in situ hybridisation (FISH) mapping (Trask (1991) Trends Genet. 7:149-154). Although current methods of FISH mapping favour use of large clones (several kb to several hundred kb; see Laan et al. (1995) Genome Res. 5:13-20), improvements in sensitivity may allow performance of FISH mapping using shorter probes.

[0365] A variety of nucleic acid amplification-based methods for genetic and physical mapping may be carried out using the nucleic acids. Examples include allele-specific amplification (Kazazian (1989) J. Lab. Clin. Med 11:95-96), polymorphism of PCR-amplified fragments (CAPS; Sheffield et al. (1993) Genomics 16:325-332), allele-specific ligation (Landegren et al. (1988) Science 241:1077-1080), nucleotide extension reactions (Sokolov (1990) Nucleic Acid Res. 18:3671), Radiation Hybrid Mapping (Walter et al. (1997) Nat. Genet. 7:22-28) and Happy Mapping (Dear and Cook (1989) Nucleic Acid Res. 17:6795-6807). For these methods, the sequence of a nucleic acid is used to design and produce primer pairs for use in the amplification reaction or in primer extension reactions. The design of such primers is well known to those skilled in the art. In methods employing PCR-based genetic mapping, it may be necessary to identify DNA sequence differences between the parents of the mapping cross in the region corresponding to the instant nucleic acid sequence. This, however, is generally not necessary for mapping methods.

[0366] The methods according to the present invention result in plants having enhanced yield-related traits, as described hereinbefore. These traits may also be combined with other economically advantageous traits, such as further yield-enhancing traits, tolerance to other abiotic and biotic stresses, traits modifying various architectural features and/or biochemical and/or physiological features.

[0367] In one embodiment the invention relates to subject mater summarized as follows:

[0368] Item 1A A method for enhancing yield-related traits in plants relative to control plants, comprising modulating expression in a plant of a nucleic acid encoding a PATELLIN polypeptide and optionally selecting for plants having enhanced yield-related traits.

[0369] Item 2A Method according to item 1A, wherein said PATELLIN polypeptide comprises at least one of the following domains:

(i) A SEC14 domain as represented by SEQ ID NO: 71: lpeldsvvfyrgadreghpvcynvygefqdkdlyekafgdeekrerflkwriqllergilsqldfspsgicsmvqvtdlknsppmlgk hravtrqavallqdnypefiakkvfinvpwwylaankmmspfltqrtkskfifaspaksaetlfryiapeqvpvqfgglfk or a domain having in increasing order of preference at least 50%, 55%, 60%, 65%, 70%, 75%, 80%, 82%, 85%, 90%, 92%, 95%, 97% or more sequence identity to the domain represented by SEQ ID NO: 71 or to any SEC14 domain as present in any of the polypeptides of Table A;
(ii) A GOLD domain as represented by SEQ ID NO: 72: sdavteltikpssketveipvtenstigwelrvlgwevsygaeftpdaeggytvivqktrkvpaneepimkgsfkvgepgkivltinn paskkkkllyrskv, or a domain having in increasing order of preference at least 50%, 55%, 60%, 65%, 70%, 75%, 80%, 82%, 85%, 90%, 92%, 95%, 97% or more sequence identity to the domain represented by SEQ ID NO: 72 or to any GOLD domain as present in any of the polypeptides of Table A.

[0370] Item 3A Method according to item 1A or 2A, wherein said modulated expression is effected by introducing and expressing in a plant a nucleic acid encoding a PATELLIN polypeptide.

[0371] Item 4A Method according to any preceding item, wherein said nucleic acid encoding a PATELLIN polypeptide encodes any one of the proteins listed in Table A or is a portion of such a nucleic acid, or a nucleic acid capable of hybridising with such a nucleic acid.

[0372] Item 5A Method according to any preceding item, wherein said nucleic acid sequence encodes an orthologue or paralogue of any of the proteins given in Table A.

[0373] Item 6A Method according to any preceding item, wherein said enhanced yield-related traits comprise increased yield, preferably seed yield relative to control plants.

[0374] Item 7A Method according to any one of items 1A to 6A, wherein said enhanced yield-related traits are obtained under conditions of nitrogen deficiency.

[0375] Item 8A Method according to any one of items 3A to 7A, wherein said nucleic acid is operably linked to a constitutive promoter, preferably to a GOS2 promoter, most preferably to a GOS2 promoter from rice.

[0376] Item 9A Method according to any preceding item, wherein said nucleic acid encoding a PATELLIN polypeptide is of plant origin, preferably from a dicotyledonous plant, further preferably from the family Poaceae, more preferably from the genus Oryza, most preferably from Oryza sativa.

[0377] Item 10A Plant or part thereof, including seeds, obtainable by a method according to any preceding item, wherein said plant or part thereof comprises a recombinant nucleic acid encoding a PATELLIN polypeptide.

[0378] Item 11A An isolated nucleic acid molecule comprising any one of the following features:

(i) a nucleic acid represented by SEQ ID NO: 9; SEQ ID NO: 11; SEQ ID NO: 13; SEQ ID NO: 15; SEQ ID NO: 17; SEQ ID NO: 19; SEQ ID NO: 21; SEQ ID NO: 23; SEQ ID NO: 25 and SEQ ID NO: 27;
(ii) a nucleic acid fragment that is complementary to any one of the SEQ ID NOs given in (i);
(iii) a nucleic acid encoding a PATELLIN polypeptide having, in increasing order of preference, at least 70%, 75%, 80%, 85%, 90%, 95%, 96%, 97%, 98%, 99% or 100% sequence identity to any one of the amino acid sequences given in SEQ ID NO: 10; SEQ ID NO: 12; SEQ ID NO: 14; SEQ ID NO: 16; SEQ ID NO: 18; SEQ ID NO: 20; SEQ ID NO: 22; SEQ ID NO: 24; SEQ ID NO: 26 and SEQ ID NO: 28;
(iv) a nucleic acid capable of hybridizing under stringent conditions to any one of the nucleic acids given in (i), (ii) or (iii) above.

[0379] Item 12A An isolated polypeptide comprising:

(I) an amino acid sequence having, in increasing order of preference, at least 80%, 85%, 90%, 95%, 96%, 97%, 98%, 99% or 100% sequence identity to any one of the amino acid sequences given in SEQ ID NO: 10, SEQ ID NO: 12, SEQ ID NO: 14, SEQ ID NO: 16, SEQ ID NO: 18, SEQ ID NO: 20, SEQ ID NO: 22, SEQ ID NO: 24; SEQ ID NO: 26 and SEQ ID NO: 28;
(ii) derivatives of any of the amino acid sequences given in (i).

[0380] Item 13A Construct comprising:

(I) nucleic acid encoding a PATELLIN polypeptide as defined in items 1A, 2A or 12A, or a nucleic acid according to item 11;
(ii) one or more control sequences capable of driving expression of the nucleic acid sequence of (a); and optionally
(iii) a transcription termination sequence.

[0381] Item 14A Construct according to item 13A, wherein one of said control sequences is a constitutive promoter, preferably a GOS2 promoter, most preferably a GOS2 promoter from rice.

[0382] Item 15A Use of a construct according to item 13A or 14A in a method for making plants having increased yield, particularly increased biomass and/or increased seed yield relative to control plants.

[0383] Item 16A Plant, plant part or plant cell transformed with a construct according to item 13A or 14A.

[0384] Item 17A Method for the production of a transgenic plant having increased yield, preferably increased seed yield relative to control plants, comprising:

(i) introducing and expressing in a plant a nucleic acid encoding a PATELLIN polypeptide as defined in item 1A, 2A or 12A, or a nucleic acid according to item 11A; and
(ii) cultivating the plant cell under conditions promoting plant growth and development; and optionally
(iii) selecting for plants having enhanced yield-related traits

[0385] Item 18A Transgenic plant having increased yield, particularly increased seed yield, relative to control plants, resulting from modulated expression of a nucleic acid encoding a PATELLIN polypeptide as defined in item 1A or 2A, or a transgenic plant cell derived from said transgenic plant.

[0386] Item 19A Transgenic plant according to item 11A, 16A or 18A, or a transgenic plant cell derived thereof, wherein said plant is a crop plant or a monocot or a cereal, such as rice, maize, wheat, barley, millet, rye, triticale, sorghum and oats.

[0387] Item 20A Harvestable parts of a plant according to item 19A, wherein said harvestable parts are preferably shoot biomass and/or seeds.

[0388] Item 21A Products derived from a plant according to item 19A and/or from harvestable parts of a plant according to item 20A.

[0389] Item 22A Use of a nucleic acid encoding a PATELLIN polypeptide in increasing yield, particularly in increasing seed yield and/or shoot biomass in plants, relative to control plants.

[0390] Item 1B A method for enhancing yield-related traits in plants relative to control plants, comprising modulating expression in a plant of a nucleic acid encoding a PRP38 polypeptide.

[0391] Item 2B Method according to item 1B, wherein said PRP38 polypeptide comprises one or more of the following motifs:

(i) A DUF1777 domain
(ii) An RS domain
(iii) Motif 1a (SEQ ID NO: 120) wherein any amino acid residue may be substituted by a conservative amino acid and/or up to 50% of the amino acid residues may be substituted by a non conservative amino acid.
(iv) Motif 1a (SEQ ID NO: 121) wherein any amino acid residue may be substituted by a conservative amino acid and/or up to 50% of the amino acid residues may be substituted by a non conservative amino acid.
(v) Motif 1a (SEQ ID NO: 122) wherein any amino acid residue may be substituted by a conservative amino acid and/or up to 50% of the amino acid residues may be substituted by a non conservative amino acid.

[0392] Item 3B Method according to item 1B or 2B, wherein said modulated expression is effected by introducing and expressing in a plant a nucleic acid encoding a PRP38 polypeptide.

[0393] Item 4B Method according to any preceding item, wherein said nucleic acid encoding a PRP38 polypeptide encodes any one of the proteins listed in Table A or is a portion of such a nucleic acid, or a nucleic acid capable of hybridising with such a nucleic acid.

[0394] Item 5B Method according to any preceding item, wherein said nucleic acid sequence encodes an orthologue or paralogue of any of the proteins given in Table A.

[0395] Item 6B Method according to any preceding item, wherein said enhanced yield-related traits comprise increased yield, preferably increased biomass and/or increased seed yield relative to control plants.

[0396] Item 7B Method according to any one of items 1B to 6B, wherein said enhanced yield-related traits are obtained under non-stress conditions.

[0397] Item 8B Method according to any one of items 1B to 6B, wherein said enhanced yield-related traits are obtained under conditions of nitrogen deficiency.

[0398] Item 9B Method according to any one of items 3B to 8B, wherein said nucleic acid is operably linked to a constitutive promoter, preferably to a GOS2 promoter, most preferably to a GOS2 promoter from rice.

[0399] Item 10B Method according to any preceding item, wherein said nucleic acid encoding a PRP38 polypeptide is of plant origin, preferably from a dicotyledonous plant, further preferably from the family Brassicaceae, more preferably from the genus Arabidopsis, most preferably from Arabidopsis thaliana.

[0400] Item 11 B Plant or part thereof, including seeds, obtainable by a method according to any preceding item, wherein said plant or part thereof comprises a recombinant nucleic acid encoding a PRP38 polypeptide.

[0401] Item 12B Construct comprising:

(i) nucleic acid encoding a PRP38 polypeptide as defined in items 1 or 2;
(ii) one or more control sequences capable of driving expression of the nucleic acid sequence of (a); and optionally
(iii) a transcription termination sequence.

[0402] Item 13B Construct according to item 12,B wherein one of said control sequences is a constitutive promoter, preferably a GOS2 promoter, most preferably a GOS2 promoter from rice.

[0403] Item 14B Use of a construct according to item 12B or 13B in a method for making plants having increased yield, particularly increased biomass and/or increased seed yield relative to control plants.

[0404] Item 15B Plant, plant part or plant cell transformed with a construct according to item 12B or 13B.

[0405] Item 16B Method for the production of a transgenic plant having increased yield, particularly increased biomass and/or increased seed yield relative to control plants, comprising:

(i) introducing and expressing in a plant a nucleic acid encoding a PRP38 polypeptide as defined in item 1B or 2B; and
(ii) cultivating the plant cell under conditions promoting plant growth and development.

[0406] Item 17B Transgenic plant having increased yield, particularly increased biomass and/or increased seed yield, relative to control plants, resulting from modulated expression of a nucleic acid encoding a PRP38 polypeptide as defined in item 1B or 2B, or a transgenic plant cell derived from said transgenic plant.

[0407] Item 18B Transgenic plant according to item 11B, 15B or 17B, or a transgenic plant cell derived thereof, wherein said plant is a crop plant or a monocot or a cereal, such as rice, maize, wheat, barley, millet, rye, triticale, sorghum and oats.

[0408] Item 19B Harvestable parts of a plant according to item 18B, wherein said harvestable parts are preferably shoot biomass and/or seeds.

[0409] Item 20B Products derived from a plant according to item 18B and/or from harvestable parts of a plant according to item 19B.

[0410] Item 21B Use of a nucleic acid encoding a PRP38 polypeptide in increasing yield, particularly in increasing seed yield and/or shoot biomass in plants, relative to control plants.

[0411] Item 10 A method for increasing one or more of Thousand Kernel Weight, total weight of seeds and number of filled seeds in plants relative to control plants, comprising modulating expression in a plant of a nucleic acid encoding a GATA-like polypeptide, wherein said GATA-like polypeptide belongs to subfamily II of GATA transcription factors and comprises a GATA domain.

[0412] Item 2C Method according to item 10, wherein said GATA-like polypeptide comprises one or more of the following motifs:

(SEQ ID NO: 130)
(i) Motif 1c:
C(S/A/T)(D/E/N)CXT(T/S/A)(K/S)TP(L/M)WR(S/G/N)GP,
(SEQ ID NO: 131)
(ii) Motif 2c:
GPKSLCNACGIRX(R/K)K,
(SEQ ID NO: 132)
(iii) Motif 3c:
(A/S)(A/W)X(L/C)(L/N)(M/L/V)(T/L/A)(L/D)(S/R)

[0413] Item 3C Method according to item 10 or 2C, wherein said modulated expression is effected by introducing and expressing in a plant a nucleic acid encoding a GATA-like polypeptide.

[0414] Item 4C Method according to any preceding item, wherein said nucleic acid encoding a GATA-like polypeptide encodes any one of the proteins listed in Table A or is a portion of such a nucleic acid, or a nucleic acid capable of hybridising with such a nucleic acid.

[0415] Item 5C Method according to any preceding item, wherein said nucleic acid sequence encodes an orthologue or paralogue of any of the proteins given in Table A.

[0416] Item 6C Method according to any one of items 10 to 5C, wherein said enhanced yield-related traits are obtained under non-stress conditions.

[0417] Item 7C Method according to any one of items 3C to 6C, wherein said nucleic acid is operably linked to a constitutive promoter, preferably to a GOS2 promoter, most preferably to a GOS2 promoter from rice.

[0418] Item 8C Method according to any preceding item, wherein said nucleic acid encoding a GATA-like polypeptide is of plant origin, preferably from a monocotyledonous plant, further preferably from the family Poaceae, more preferably from the genus Oryza, most preferably from Oryza sativa.

[0419] Item 9C Plant or part thereof, including seeds, obtainable by a method according to any preceding item, wherein said plant or part thereof comprises a recombinant nucleic acid encoding a GATA-like polypeptide operably linked to constitutive promoter of plant origin, preferably a GOS2 promoter, more preferably a GOS2 promoter from rice.

[0420] Item 10C Construct comprising:

(i) nucleic acid encoding a GATA-like polypeptide as defined in items 10 or 2C;
(ii) one or more control sequences of plant origin capable of driving expression of the nucleic acid sequence of (a); and optionally
(iii) a transcription termination sequence.

[0421] Item 11C Construct according to item 10C, wherein one of said control sequences is a constitutive promoter, preferably a GOS2 promoter, most preferably a GOS2 promoter from rice.

[0422] Item 12C Use of a construct according to item 10Cor 11C in a method for making plants having increased seed yield, comprising one or more of Thousand Kernel Weight, total weight of seeds and number of filled seeds, relative to control plants.

[0423] Item 13C Plant, plant part or plant cell transformed with a construct according to item 100 or 11C.

[0424] Item 14C Method for the production of a transgenic plant having increased yield, particularly increased biomass and/or increased seed yield relative to control plants, comprising:

(i) introducing and expressing in a plant a nucleic acid encoding a GATA-like polypeptide as defined in item 10 or 2C and operably linked to a constitutive promoter of plant origin; and
(ii) cultivating the plant cell under conditions promoting plant growth and development.

[0425] Item 15C Transgenic plant having increased Thousand Kernel Weight, relative to control plants, resulting from modulated expression of a nucleic acid encoding a GATA-like polypeptide as defined in item 10 or 2C, or a transgenic plant cell derived from said transgenic plant.

[0426] Item 16C Transgenic plant according to item 9C, 13C or 15C, or a transgenic plant cell derived thereof, wherein said plant is a crop plant or a monocot or a cereal, such as rice, maize, wheat, barley, millet, rye, triticale, sorghum and oats.

[0427] Item 17C Harvestable parts of a plant according to item 17C, wherein said harvestable parts are preferably seeds.

[0428] Item 18C Products derived from a plant according to item 16C and/or from harvestable parts of a plant according to item 17C.

[0429] Item 19C Use of a nucleic acid encoding a GATA-like polypeptide in increasing one or more of Thousand Kernel Weight, total weight of seeds and number of filled seeds in plants, relative to control plants.

[0430] Item 1D A method for enhancing yield-related traits in plants relative to control plants, comprising modulating expression in a plant of a nucleic acid encoding an ADA2 polypeptide and optionally selecting for plants having enhanced yield-related traits.

[0431] Item 2D Method according to item 1 D, wherein said ADA2 polypeptide comprises two or more of the following motifs:

(i) A Zinc (Zn) finger ZZ type domain as represented by SEQ ID NO: 207: kpglyccnycdkdlsglvrfkcavcmdfdlcvecfsvgvelnrhkn or a domain having in increasing order of preference at least 50%, 55%, 60%, 65%, 70%, 75%, 80%, 82%, 85%, 90%, 92%, 95%, 97% or more sequence identity to the domain represented by SEQ ID NO: 207 or to any Zn finger ZZ type domain as present in any one of the polypeptides of Table A;
(ii) A SANT DNA binding domain as represented by SEQ ID NO: 208: vtsdwnadeeillleaiatygfgnwkevadhvgsktttecikhfnsaym, or a domain having in increasing order of preference at least 50%, 55%, 60%, 65%, 70%, 75%, 80%, 82%, 85%, 90%, 92%, 95%, 97% or more sequence identity to the domain represented by SEQ ID NO: 208 or to any SANT domain as present in any one of the polypeptides of Table A;
(iii) A Ca binding EF hand domain as represented by SEQ ID NO: 209: dndaeqlladmef, or a domain having in increasing order of preference at least 50%, 55%, 60%, 65%, 70%, 75%, 80%, 82%, 85%, 90%, 92%, 95%, 97% or more sequence identity to the domain represented by SEQ ID NO: 209 or to any Ca binding EF hand domain as present in any one of the polypeptides of Table A;
(iv) A SWIRM domain as represented by SEQ ID NO: 210: priysgldtwdvdgllgadllsetekkmcnetrilpvhylkmldiltreikkgqikkksdaysffkvepskvdrvydmlvhkgigdst, or a domain having in increasing order of preference at least 50%, 55%, 60%, 65%, 70%, 75%, 80%, 82%, 85%, 90%, 92%, 95%, 97% or more sequence identity to the domain represented by SEQ ID NO: 210 or to any SWRIM domain as present in any one of the polypeptides of Table A;

[0432] Item 3D Method according to item 1D or 2D, wherein said modulated expression is effected by introducing and expressing in a plant a nucleic acid encoding an ADA2 polypeptide.

[0433] Item 4D Method according to any preceding item, wherein said nucleic acid encoding an ADA2 polypeptide encodes any one of the proteins listed in Table A or is a portion of such a nucleic acid, or a nucleic acid capable of hybridising with such a nucleic acid.

[0434] Item 5D Method according to any preceding item, wherein said nucleic acid sequence encodes an orthologue or paralogue of any of the proteins given in Table A.

[0435] Item 6D Method according to any preceding item, wherein said enhanced yield-related traits comprise increased yield, preferably seed yield relative to control plants.

[0436] Item 7D Method according to any one of items 1D to 6D, wherein said enhanced yield-related traits are obtained under mild-stress conditions.

[0437] Item 8D Method according to any one of items 1D to 6D, wherein said enhanced yield-related traits are obtained under conditions of nitrogen deficiency.

[0438] Item 9D Method according to any one of items 3D to 8D, wherein said nucleic acid is operably linked to a constitutive promoter, preferably to a HMGP promoter, most preferably to a HMGP promoter from rice.

[0439] Item 10D Method according to any preceding item, wherein said nucleic acid encoding an ADA2 polypeptide is of plant origin, preferably from a dicotyledonous plant, further preferably from the family Brassicaceae, more preferably from the genus Arabidopsis, most preferably from Arabidopsis thaliana.

[0440] Item 11 D Plant or part thereof, including seeds, obtainable by a method according to any preceding item, wherein said plant or part thereof comprises a recombinant nucleic acid encoding an ADA2 polypeptide.

[0441] Item 12D Construct comprising:

(i) nucleic acid encoding an ADA2 polypeptide as defined in items 1D or 2D;
(ii) one or more control sequences capable of driving expression of the nucleic acid sequence of (a); and optionally
(iii) a transcription termination sequence.

[0442] Item 13D Construct according to item 12D, wherein one of said control sequences is a constitutive promoter, preferably a HMGP promoter, most preferably a HMGP promoter from rice.

[0443] Item 14D Use of a construct according to item 12D or 13D in a method for making plants having increased yield, particularly increased biomass and/or increased seed yield relative to control plants.

[0444] Item 15D Plant, plant part or plant cell transformed with a construct according to item 12D or 13D.

[0445] Item 16D Method for the production of a transgenic plant having increased yield, particularly increased seed yield relative to control plants, comprising:

(i) introducing and expressing in a plant a nucleic acid encoding an ADA2 polypeptide as defined in item 1D or 2D; and
(ii) cultivating the plant cell under conditions promoting plant growth and development; and optionally
(iii) selecting for plants having enhanced yield-related traits

[0446] Item 17D Transgenic plant having increased yield, particularly increased seed yield, relative to control plants, resulting from modulated expression of a nucleic acid encoding an ADA2 polypeptide as defined in item 1D or 2D, or a transgenic plant cell derived from said transgenic plant.

[0447] Item 18D Transgenic plant according to item 11D, 15D or 17D, or a transgenic plant cell derived thereof, wherein said plant is a crop plant or a monocot or a cereal, such as rice, maize, wheat, barley, millet, rye, triticale, sorghum and oats.

[0448] Item 19D Harvestable parts of a plant according to item 19, wherein said harvestable parts are preferably shoot biomass and/or seeds.

[0449] Item 20D Products derived from a plant according to item 18D and/or from harvestable parts of a plant according to item 19D.

[0450] Item 21 D Use of a nucleic acid encoding an ADA2 polypeptide in increasing yield, particularly in increasing seed yield and/or shoot biomass in plants, relative to control plants.

[0451] Item 1E An isolated nucleic acid sequence encoding a WD40 repeat (WDR) 23-like polypeptide comprising:

(i) an isolated nucleic acid sequence as represented by SEQ ID NO: 219, SEQ ID NO: 225, or SEQ ID NO: 229;
(ii) the complement of an isolated nucleic acid sequence as represented by SEQ ID NO: 219, SEQ ID NO: 225, or SEQ ID NO: 229;
(iii) an isolated nucleic acid sequence encoding a polypeptide sequence as represented by SEQ ID NO: 220, SEQ ID NO: 226, or SEQ ID NO: 230;
(iv) an isolated nucleic acid sequence deduced from a polypeptide sequence as represented by SEQ ID NO: 220, SEQ ID NO: 226, or SEQ ID NO: 230, as a result of the degeneracy of the genetic code;
(v) an isolated nucleic acid sequence capable of stringently hybridising to a nucleic acid sequence as represented by SEQ ID NO: 219, SEQ ID NO: 225, or SEQ ID NO: 229, or to its complement;
(vi) an isolated nucleic acid sequence which encodes a polypeptide having in increasing order %, 55%, 60%, 65%, 70%, 75%, 80%, 85%, 90%, 95%, 96%, 97%, 98%, 99% or more amino acid sequence identity with a polypeptide sequence as represented by SEQ ID NO: 220, SEQ ID NO: 226, or SEQ ID NO: 230;
(vii) an isolated nucleic acid sequence which encodes a polypeptide comprising a domain having, in increasing order of preference, at least 65%, 70%, 75%, 80%, 85%, 90%, 95%, 96%, 97%, 98%, 99% or more amino acid sequence identity with a Conserved Domain as represented by SEQ ID NO: 271.

[0452] Item 2E An isolated WDR23-like polypeptide comprising:

(i) a polypeptide sequence as represented by SEQ ID NO: 220, SEQ ID NO: 226, or SEQ ID NO: 230;
(ii) a polypeptide sequence having, in increasing order of preference, at least 50%, 55%, 60%, 65%, 70%, 75%, 80%, 85%, 90%, 95%, 96%, 97%, 98%, 99% amino acid sequence identity with a polypeptide sequence as represented by SEQ ID NO: 220, SEQ ID NO: 226, or SEQ ID NO: 230;
(I) a polypeptide comprising a domain having, in increasing order of preference, at least 65%, 70%, 75%, 80%, 85%, 90%, 95%, 96%, 97%, 98%, 99% or more amino acid sequence identity with a Conserved Domain as represented by SEQ ID NO: 271;
(ii) derivatives of any of the polypeptide sequences given in (i) to (iii) above.

[0453] Item 3E A method for increasing yield-related traits in plants relative to control plants, comprising increasing expression in a plant of a nucleic acid sequence encoding a WDR23-like polypeptide, which WDR23-like polypeptide comprises a domain having at least 65%, 70%, 75%, 80%, 85%, 90%, 95%, 98%, 99% or more amino acid sequence identity to a Conserved Domain (CD) as represented by SEQ ID NO: 271, and optionally selecting for plants having increased yield-related traits.

[0454] Item 4E Method according to item 3E, wherein said WDR23-like polypeptide comprises: (i) at least four WD40 repeats with a PFAM accession PF00400; and (ii) at least two conserved D×R motifs at the end of two consecutive WD40 repeats.

[0455] Item 5E Method according to item 3E or 4E, wherein said WDR23-like polypeptide has, in increasing order of preference, at least 50%, 55%, 60%, 65%, 70%, 75%, 80%, 85%, 90%, 95%, 98%, 99% or more amino acid sequence identity to the WDR23-like polypeptide as represented by SEQ ID NO: 216, or to any of the polypeptide sequences given in Table A herein, or to a WDR23-like polypeptide as defined in item 2E.

[0456] Item 6E Method according to any one of items 3E to 5E, wherein said nucleic acid sequence encoding a WDR23-like polypeptide is represented by any one of the nucleic acid sequence SEQ ID NOs given in Table A or a portion thereof, or a sequence capable of hybridising with any one of the nucleic acid sequences SEQ ID NOs given in Table A.

[0457] Item 7E Method according to any one of imtes 3E to 6E, wherein said nucleic acid sequence encodes an orthologue or paralogue of any of the polypeptide sequence SEQ ID NOs given in Table A.

[0458] Item 8E Method according to any one of items 3E to 7E, wherein said increased expression is effected by any one or more of: T-DNA activation tagging, TILLING, or homologous recombination.

[0459] Item 9E Method according to any one of items 3E to 8E, wherein said increased expression is effected by introducing and expressing in a plant a nucleic acid sequence encoding a WDR23-like polypeptide.

[0460] Item 10E Method according to any one of items 3E to 9E, wherein said increased yield-related trait is one or more of: increased total seed yield per plant, increased seed filling rate, increased number of filled seeds, increased harvest index, or increased thousand kernel weight.

[0461] Item 11E Method according to any one of items 3E to 10E, wherein said nucleic acid sequence is operably linked to a constitutive promoter, preferably to a plant constitutive promoter, more preferably to a GOS2 promoter, most preferably to a GOS2 promoter from rice as represented by SEQ ID NO: 272.

[0462] Item 12E Method according to any one of items 3E to 10E, wherein said nucleic acid sequence is operably linked to a meristem-specific promoter, preferably to a plant metallothionein promoter, more preferably to a metallothionein promoter from rice as represented by SEQ ID NO: 273.

[0463] Item 13E Method according to any one of items 3E to 12E, wherein said nucleic acid sequence encoding a WDR23-like polypeptide is from the plant kingdom, preferably from a dicotyledonous plant, more preferably from the Brassicaceae family, most preferably from Arabidopsis thaliana.

[0464] Item 14E Plants, parts thereof (including seeds), or plant cells obtainable by a method according to any one of items 3E to 13E, wherein said plant, part or cell thereof comprises an isolated nucleic acid transgene encoding a WDR23-like polypeptide operably linked to a plant constitutive promoter.

[0465] Item 15E Plants, parts thereof (including seeds), or plant cells comprising an isolated nucleic acid transgene according to item 1 E, or comprising an isolated nucleic acid sequence encoding a WDR23-like polypeptide according to item 2E.

[0466] Item 16E Construct comprising:

(a) a nucleic acid sequence encoding a WDR23-like polypeptide as defined in any one of items 1E, 2E, or 3E to 7E;
(b) one or more control sequences capable of driving expression of the nucleic acid sequence of (a); and optionally
(c) transcription termination sequence.

[0467] Item 17E Construct according to item 16E, wherein said control sequence is a plant constitutive promoter, preferably a GOS2 promoter, more preferably a rice GOS2 promoter, most preferably a GOS2 promoter as represented by SEQ ID NO: 272.

[0468] Item 18E Construct according to item 16E, wherein said control sequence is a meristem-specific promoter, preferably a metallothionein (MT) promoter, more preferably a rice MT promoter, most preferably an MT promoter as represented by SEQ ID NO: 273.

[0469] Item 19E Use of a construct according any one of items 16E to 18E in a method for making plants having increased yield-related traits relative to control plants, which increased yield-related traits are one or more of: increased total seed yield per plant, increased seed filling rate, increased number of filled seeds, increased harvest index, or increased thousand kernel weight.

[0470] Item 20E Plant, plant part or plant cell transformed with a construct according to any one of items 16E to 18E.

[0471] Item 21E Method for the production of transgenic plants having increased yield-related traits relative to control plants, comprising:

(i) introducing and expressing in a plant, plant part, or plant cell, a nucleic acid sequence encoding a WDR23-like polypeptide as defined in any one of items 1 E or 3E to 7E; and
(ii) cultivating the plant cell, plant part, or plant under conditions promoting plant growth and development.

[0472] Item 22E Transgenic plant having increased yield-related traits relative to control plants, resulting from increased expression of a nucleic acid sequence encoding a WDR23-like polypeptide as defined in any one of items 1E, 3E to 7E, operably linked to a plant expressible promoter, or a transgenic plant cell or transgenic plant part derived from said transgenic plant.

[0473] Item 23E Transgenic plant according to item 14E, 15E, 20E or 22E, wherein said plant is a crop plant or a monocot or a cereal, such as rice, maize, wheat, barley, millet, rye, triticale, sorghum and oats, or a transgenic plant cell derived from said transgenic plant.

[0474] Item 24E Harvestable parts of a plant according to item 23E, comprising an isolated nucleic acid sequence encoding a WDR23-like polypeptide, wherein said harvestable parts are preferably seeds.

[0475] Item 25E Products derived from a plant according to item 23E and/or from harvestable parts of a plant according to item 24E.

[0476] Item 26E Use of a nucleic acid sequence encoding a WDR23-like polypeptide as defined in any one of items 1 E, 3E to 7E in increasing yield-related traits, comprising one or more of: increased total seed yield per plant, increased seed filling rate, increased number of filled seeds, increased harvest index, or increased thousand kernel weight.

### DESCRIPTION OF FIGURES

[0477] The present invention will now be described with reference to the following figures in which:

[0478] FIG. 1 represents the sequence of SEQ ID NO: 2. Domain structure and functionally relevant amino acids are highlighted. SEC14 and GOLD domains are indicated in bold and doubled underlined respectively. Amino acid residues involved in PtdIns/PtdChs binding/transfer activity are boxed, while hydrophobic residues that line the lipid-binding pocket are underlined. Salt bridge domain is shown in lowercase characters. Coiled coil region is underlined with a curly line.

[0479] FIG. 2 represents a multiple alignment of a selection of PALT polypeptides of Table A1.

[0480] FIG. 3 shows a phylogenetic tree of a selection of PALT polypeptides of Table A1.

[0481] FIG. 4 represents the binary vector for increased expression in Oryza sativa of a PALT encoding nucleic acid under the control of a rice GOS2 promoter.

[0482] FIG. 5 details examples of sequences useful in performing the methods according to the present invention.

[0483] FIG. 6 represents the sequence of SEQ ID NO: 77. Conserved domains and motifs are indicated: PRP38 domain is underlined, DUF1777 domain is in bold characters, Motifs Ib, IIb, IIIb and IVb are boxed.

[0484] FIG. 7 represents a multiple alignment of the PRP38 polypeptides of Table A2.

[0485] FIG. 8 shows a phylogenetic tree of the PRP38 polypeptides of Table A2.

[0486] FIG. 9 represents the binary vector for increased expression in Oryza sativa of a PRP38-encoding nucleic acid under the control of a rice GOS2 promoter (pGOS2).

[0487] FIG. 10 details examples of sequences useful in performing the methods according to the present invention.

[0488] FIG. 11 represents the domain structure of SEQ ID NO: 129 with the GATA domain in bold and the conserved motifs 1c to 3c underlined.

[0489] FIG. 12 represents a multiple alignment of Subgroup II GATA-like polypeptides. The dots indicate conserved residues, the colons indicate highly conserved residues and the asterisks indicate identical amino acids.

[0490] FIG. 13 represents the binary vector for increased expression in Oryza sativa of a GATA-like-encoding nucleic acid under the control of a rice GOS2 promoter (pGOS2::GATA-like).

[0491] FIG. 14 details examples of sequences useful in performing the methods according to the present invention.

[0492] FIG. 15 represents the sequence of SEQ ID NO: 182. Conserved domains and motifs are indicated. A “KRKK” putative nuclear localization signal is boxed, a Zinc Finger ZZ type domain is highlighted in bold, SANT DNA binding domain is underlined and in bold characters, a Ca binding EF hand domain is indicated in italics and underlined and the SWIRM domain is underlined with a double line. Relevant Lys (K) residue in the central part of the protein and putatively mediating acetylation of ADA2 is boxed.

[0493] FIG. 16 represents a multiple alignment of the ADA2 polypeptides of Table A4.

[0494] FIG. 17 shows a phylogenetic tree of the ADA2 polypeptides of Table A4.

[0495] FIG. 18 and FIG. 19 represents the binary vectors for increased expression in Oryza sativa of an ADA2-encoding nucleic acid under the control of a rice HMGP promoter (FIG. 18) and under the EXP9 promoter (FIG. 19).

[0496] FIG. 20 details examples of sequences useful in performing the methods according to the present invention.

[0497] FIG. 21 represents a cartoon of the structure of a WRD23-like as represented by SEQ ID NO: 216. The WD40 repeats corresponding to PFAM accession PF00400 are schematically represented.

[0498] FIG. 22 shows the function of the WRD23 in Homo sapiens. WRD23 is part of a multiprotein ubiquitin E3 ligase complex of which Cullin 4 (CUL4) and damaged DNA binding protein 1 (DDB1) are the core proteins (Higa et al. (2007) Cell Division 2:5; Angers et al. (2006) Nature 443: 590-593; Higa et al. (2006) Nature Cell Biol 8(11): 1277-1283; He et al. (2006) Genes & Development 20: 2949-2954). This complex docks WD40 proteins, such as WRD23, as molecular adaptors for substrate recruiting mechanism, which substrate will subsequently be ubiquitinated and destroyed.

[0499] FIG. 23 shows a sequence alignment representing the D×R motifs conserved in two consecutive blades of the WD40, in the WRD23 from Homo sapiens (NCBI accession AK057636), Aspergillus niger (NCBI accession CAK40817) and the plant WRD23-like polypeptides of Table A5.

[0500] FIG. 24 shows an AlignX (from Vector NTI 10.3, Invitrogen Corporation) multiple sequence alignment of the WDR23-like polypeptides from Table A5. The beginning and the end of the Conserved Domain (CD), for example as represented by SEQ ID NO: 271, is shown using brackets. The WD40 repeats corresponding to PF00400 are marked by X's under the consensus sequence. The D×R motifs are also identified under the consensus sequence.

[0501] FIG. 25 shows the binary vector for increased expression in Oryza sativa of a nucleic acid sequence encoding a WDR23-like polypeptide under the control of a plant expressible promoter, such as a GOS2 promoter or metallothionein promoter, both from rice.

[0502] FIG. 26 details examples of sequences useful in performing the methods according to the present invention.

### EXAMPLES

[0503] The present invention will now be described with reference to the following examples, which are by way of illustration alone. The following examples are not intended to completely define or otherwise limit the scope of the invention.

[0504] DNA manipulation: unless otherwise stated, recombinant DNA techniques are performed according to standard protocols described in (Sambrook (2001) Molecular Cloning: a laboratory manual, 3rd Edition Cold Spring Harbor Laboratory Press, CSH, New York) or in Volumes 1 and 2 of Ausubel et al. (1994), Current Protocols in Molecular Biology, Current Protocols. Standard materials and methods for plant molecular work are described in Plant Molecular Biology Labfax (1993) by R. D. D. Croy, published by BIOS Scientific Publications Ltd (UK) and Blackwell Scientific Publications (UK).

### Example 1

### Identification of Sequences Related to the Nucleic Acid Sequence Used in the Methods of the Invention

[0505] Sequences (full length cDNA, ESTs or genomic) related to the nucleic acid sequence used in the methods of the present invention were identified amongst those maintained in the Entrez Nucleotides database at the National Center for Biotechnology Information (NCBI) using database sequence search tools, such as the Basic Local Alignment Tool (BLAST) (Altschul et al. (1990) J. Mol. Biol. 215:403-410; and Altschul et al. (1997) Nucleic Acids Res. 25:3389-3402). The program was used to find regions of local similarity between sequences by comparing nucleic acid or polypeptide sequences to sequence databases and by calculating the statistical significance of matches. For example, the polypeptide encoded by the nucleic acid used in the present invention was used for the TBLASTN algorithm, with default settings and the filter to ignore low complexity sequences set off. The output of the analysis was viewed by pairwise comparison, and ranked according to the probability score (E-value), where the score reflect the probability that a particular alignment occurs by chance (the lower the E-value, the more significant the hit). In addition to E-values, comparisons were also scored by percentage identity. Percentage identity refers to the number of identical nucleotides (or amino acids) between the two compared nucleic acid (or polypeptide) sequences over a particular length.

[0506] Table A provides a list of nucleic acid sequences related to the nucleic acid sequence used in the methods of the present invention.

[0507] The term “table A” used in this specification is to be taken to specify the content of table A1, and/or A2, and/or A3, and/or A4, and/or A5. The term “table A1” used in this specification is to be taken to specify the content of table A1. The term “table A2” used in this specification is to be taken to specify the content of table A2. The term “table A3” used in this specification is to be taken to specify the content of table A3. The term “table A4” used in this specification is to be taken to specify the content of table A4. The term “table A5” used in this specification is to be taken to specify the content of table A5. In one preferred embodiment, the term “table A” means table A1. In one preferred embodiment, the term “table A” means table A2. In one preferred embodiment, the term “table A” means table A3. In one preferred embodiment, the term “table A” means table A4. In one preferred embodiment, the term “table A” means table A5.

[0508] The term “table B” used in this specification is to be taken to specify the content of table B1, and/or B2, and/or B3, and/or B4, and/or B5. The term “table B1” used in this specification is to be taken to specify the content of table B1. The term “table B2” used in this specification is to be taken to specify the content of table B2. The term “table B3” used in this specification is to be taken to specify the content of table B3. The term “table B4” used in this specification is to be taken to specify the content of table B4. The term “table B5” used in this specification is to be taken to specify the content of table B5. In one preferred embodiment, the term “table B” means table B1. In one preferred embodiment, the term “table B” means table B2. In one preferred embodiment, the term “table B” means table B3. In one preferred embodiment, the term “table B” means table B4. In one preferred embodiment, the term “table B” means table B5.

[0509] The term “table C” used in this specification is to be taken to specify the content of table C1, and/or C2, and/or C3, and/or C4, and/or C5. The term “table C1” used in this specification is to be taken to specify the content of table C1. The term “table C2” used in this specification is to be taken to specify the content of table C2. The term “table C3” used in this specification is to be taken to specify the content of table C3. The term “table C4” used in this specification is to be taken to specify the content of table C4. The term “table C5” used in this specification is to be taken to specify the content of table C5. In one preferred embodiment, the term “table C” means table C1. In one preferred embodiment, the term “table C” means table C2. In one preferred embodiment, the term “table C” means table C3. In one preferred embodiment, the term “table C” means table C4. In one preferred embodiment, the term “table C” means table C5.

[0510] The term “table D” used in this specification is to be taken to specify the content of table D1, and/or D2, and/or D3, and/or D4, and/or D5. The term “table D1” used in this specification is to be taken to specify the content of table D1. The term “table D2” used in this specification is to be taken to specify the content of table D2. The term “table D3” used in this specification is to be taken to specify the content of table D3. The term “table D4” used in this specification is to be taken to specify the content of table D4. The term “table D5” used in this specification is to be taken to specify the content of table D5. In one preferred embodiment, the term “table D” means table D1. In one preferred embodiment, the term “table D” means table D2. In one preferred embodiment, the term “table D” means table D3. In one preferred embodiment, the term “table D” means table D4. In one preferred embodiment, the term “table D” means table D5.

TABLE A1
Examples of PATL nucleic acids and polypeptides:

| | | Nucleic | |
|---|---|---|---|
| | | acid | |
| | Species of | SEQ ID | Polypeptide |
| Name | origin | NO: | SEQ ID NO: |
| Orysa_PATL_1 | Oryza sativa | 1 | 2 |
| Orysa_PATL_2 | Oryza sativa | 3 | 4 |
| Orysa_PATL_3 | Oryza sativa | 5 | 6 |
| Orysa_PATL_4 | Oryza sativa | 7 | 8 |
| Brana_PATL_1 | Brasica napus | 9 | 10 |
| Helan_PATL_1 | Heliantus annus | 11 | 12 |
| Zeama_PATL_1 | Zea mays | 13 | 14 |
| Glyma_PATL_1 | Glycine max | 15 | 16 |
| Triaes_PATL_2 | Triticum aestivum | 17 | 18 |
| Triaes_PATL_3 | Triticum aestivum | 19 | 20 |
| Glyma_PATL_2 | Glycine max | 21 | 22 |
| Glyma_PATL_3 | Glycine max | 23 | 24 |
| Zeama_PATL_2 | Zea mays | 25 | 26 |
| Zeama_PATL_4 | Zea mays | 27 | 28 |
| Sacof_PATL_1 | Saccharum officinarum | 29 | 30 |
| Sacof_PATL_2 | Saccharum officinarum | 31 | 32 |
| Sacof_PATL_3 | Saccharum officinarum | 33 | 34 |
| Sacof_PATL_4 | Saccharum officinarum | 35 | 36 |
| Triae_PATL_1 | Triticum aestivum | 37 | 38 |
| Arath_PATL_1 | Arabdidopsis thaliana | 39 | 40 |
| Arath_PATL_2 | Arabdidopsis thaliana | 41 | 42 |
| Arath_PATL_3 | Arabdidopsis thaliana | 43 | 44 |
| Arath_PATL_4 | Arabdidopsis thaliana | 45 | 46 |
| Arath_PATL_5 | Arabdidopsis thaliana | 47 | 48 |
| Arath_PATL_6 | Arabdidopsis thaliana | 49 | 50 |
| Poptr_PATL_1 | Populus trichocarpa | 51 | 52 |
| Poptr_PATL_2 | Populus trichocarpa | 53 | 54 |
| Poptr_PATL_3 | Populus trichocarpa | 55 | 56 |
| Poptr_PATL_4 | Populus trichocarpa | 57 | 58 |
| Lyces_PATL_1 | Lycopersicum esculentum | 59 | 60 |
| Medtr_PATL_1 | Medicago truncatula | 61 | 62 |
| Betvu_PATL_1 | Beta vulgaris | 63 | 64 |
| Chlre_PATL_1 | Chlamydomonas | 65 | 66 |
| | reinhardtii | | |
| Dicdi_PATL_1 | Dictyostelium discoideum | 67 | 68 |

TABLE A2
Examples of PRP38 nucleic acids and polypeptides:

| | Species of | Nucleic acid | Polypeptide |
|---|---|---|---|
| Name | origin | SEQ ID NO: | SEQ ID NO: |
| Arath_PRP38_1 | Arabidopsis thaliana | SEQ ID NO: 76 | SEQ ID NO: 77 |
| Arath_PRP38_2 | Arabidopsis thaliana | SEQ ID NO: 78 | SEQ ID NO: 79 |
| Arath_PRP38_3 | Arabidopsis thaliana | SEQ ID NO: 80 | SEQ ID NO: 81 |
| Arath_PRP38_4 | Arabidopsis thaliana | SEQ ID NO: 82 | SEQ ID NO: 83 |
| Arath_PRP38_5 | Arabidopsis thaliana | SEQ ID NO: 84 | SEQ ID NO: 85 |
| brasy_PRP38_1 | Brachypodium sylvaticum | SEQ ID NO: 86 | SEQ ID NO: 87 |
| brasy_PRP38_2 | Brachypodium sylvaticum | SEQ ID NO: 88 | SEQ ID NO: 89 |
| Chlre_PRP38_1 | Chlamydomonas reinhardtii | SEQ ID NO: 90 | SEQ ID NO: 91 |
| Horvu_PRP38_1 | Hordeum vulgare | SEQ ID NO: 92 | SEQ ID NO: 93 |
| Lyces_PRP38_1 | Lycopersicum esculentum | SEQ ID NO: 94 | SEQ ID NO: 95 |
| Medtr_PRP38_1 | Medicago truncatula | SEQ ID NO: 96 | SEQ ID NO: 97 |
| Orysa_PRP38_1 | Oryza sativa | SEQ ID NO: 98 | SEQ ID NO: 99 |
| Orysa_PRP38_2 | Oryza sativa | SEQ ID NO: 100 | SEQ ID NO: 101 |
| Ostta_PRP38_1 | Ostreococcus tauri | SEQ ID NO: 102 | SEQ ID NO: 103 |
| Ostta_PRP38_2 | Ostreococcus tauri | SEQ ID NO: 104 | SEQ ID NO: 105 |
| Poptr_PRP38_1 | Populus trichocarpa | SEQ ID NO: 106 | SEQ ID NO: 107 |
| Poptr_PRP38_2 | Populus trichocarpa | SEQ ID NO: 108 | SEQ ID NO: 109 |
| Sacof_PRP38_1 | Saccharum officiarum | SEQ ID NO: 110 | SEQ ID NO: 111 |
| Sacof_PRP38_3 | Saccharum officiarum | SEQ ID NO: 112 | SEQ ID NO: 113 |
| Schce_PRP38_1 | Saccharomyces cerevisie | SEQ ID NO: 114 | SEQ ID NO: 115 |
| Triae_PRP38_1 | Triticum aestivum | SEQ ID NO: 116 | SEQ ID NO: 117 |
| Vitvi_PRP38_1 | Vitis vinifera | SEQ ID NO: 118 | SEQ ID NO: 119 |

TABLE A3
Examples of GATA-like polypeptides:

| | Nucleic acid | Protein |
|---|---|---|
| Plant Source | SEQ ID NO: | SEQ ID NO: |
| Oryza sativa | 128 | 129 |
| Oryza sativa | 137 | 138 |
| Oryza sativa | 139 | 140 |
| Oryza sativa | 141 | 142 |
| Oryza sativa | 143 | 144 |
| Oryza sativa | 145 | 146 |
| Arabidopsis | 147 | 148 |
| thaliana | | |
| Arabidopsis | 149 | 150 |
| thaliana | | |
| Arabidopsis | 151 | 152 |
| thaliana | | |
| Arabidopsis | 153 | 154 |
| thaliana | | |
| Arabidopsis | 155 | 156 |
| thaliana | | |
| Arabidopsis | 157 | 158 |
| thaliana | | |
| Arabidopsis | 137 | 138 |
| thaliana | | |
| Vitis vinifera | 139 | 140 |
| Vitis vinifera | 141 | 142 |
| Arabidopsis | 143 | 144 |
| thaliana | | |
| Vitis vinifera | 145 | 146 |
| Vitis vinifera | 147 | 148 |
| Oryza sativa | 149 | 150 |
| Oryza sativa | 151 | 152 |
| Arabidopsis | 153 | 154 |
| thaliana | | |
| Oryza sativa | 155 | 156 |

TABLE A4
Examples of ADA2 nucleic acids and polypeptides:

| | | Nucleic | |
|---|---|---|---|
| | | acid | |
| | Species of | SEQ ID | Polypeptide |
| Name | origin | NO: | SEQ ID NO: |
| Arath_ADA2_1 | Arabidopsis thaliana | 181 | 182 |
| Arath_ADA2_2 | Arabidopsis thaliana | 183 | 184 |
| Dicdi_ADA2_1 | Dictyostelium discoideum | 185 | 186 |
| Lyces_ADA2_1 | Lycopersicum esculentum | 187 | 188 |
| Lyces_ADA2_2 | Lycopersicum esculentum | 189 | 190 |
| Ostlu_ADA2_1 | Ostreococcus lucimarinus | 191 | 192 |
| Orysa_ADA2_1 | Oryza sativa | 193 | 194 |
| Poptr_ADA2_1 | Populus | 195 | 196 |
| | trichocarpa | | |
| Poptr_ADA2_2 | Populus trichocarpa | 197 | 198 |
| Poptr_ADA2_3 | Populus trichocarpa | 199 | 200 |
| Vitvi_ADA2_1 | Vitits vinifera | 201 | 202 |
| Zeama_ADA_1 | Zea mays | 203 | 204 |
| Zeama_ADA_2 | Zea mays | 205 | 206 |

TABLE A5
Examples of WDR23-like polypeptide sequences, and encoding nucleic acid
sequences:

| | | Public database | Nucleic acid | Polypeptide | |
|---|---|---|---|---|---|
| | | accession | sequence SEQ | sequence | |
| Name | Source organism | number | ID NO: | SEQ ID NO: | Status |
| Arath_WDR23 | Arabidopsis thaliana | AT4G03020 | 215 | 216 | Full length |
| Aqufo_WDR23 | Aquilegia formosa x | DR934238, | 217 | 218 | Full length |
| | Aquilegia pubescens | DT758266 | | | |
| Brana_WDR23 | Brassica napus | Proprietary | 219 | 220 | Full length |
| Glyma_WDR23 | Glycine max | EH262769.1, | 221 | 222 | Full length |
| | | BE807607.1, | | | |
| | | BM178842.1 | | | |
| Goshi_WDR23 | Gossypium hirsutum | DT571300, | 223 | 224 | Full length |
| | | DW224686.1\| | | | |
| Helan_WDR23 | Helianthus annuus | Proprietary | 225 | 226 | Full length |
| Horvu_WDR23 II | Hordeum vulgare | TA42103_4513 | 227 | 228 | Full length |
| Linus_WDR23 | Linum usitatissum | Proprietary | 229 | 230 | Full length |
| Liter_WDR23 (or | Lithospermum | D83074.1 | 231 | 232 | Full length |
| LEC14B) | erythrorhizon | | | | |
| Lyces_WDR23 | Lycopersicon | BT013732.1 | 233 | 234 | Full length |
| | esculentum | | | | |
| Medtr_WDR23 | Medicago truncatula | TC107985 | 235 | 236 | Full length |
| Orysa_WDR23 | Oryza sativa | NM_001062054 | 237 | 238 | Full length |
| | | (Os05g0407200) | | | |
| Pinra_WDR23 | Pinus radiata | AEB27202 | 239 | 240 | Full length |
| Poptr_WDR23 | Populus tremuloides | scaff_XIV.822 | 241 | 242 | Full length |
| | | [1577] f [31-1497] | | | |
| Pruar_WDR23 | Prunus armeniaca | U82760.1 | 243 | 244 | Full length |
| (LEC14B) | | | | | |
| Sacof_WDR23 II | Saccharum officinarum | CA119761, | 245 | 246 | Full length |
| | | CA209562.1, | | | |
| | | CA198970.1 | | | |
| Triae_WRD23 | Triticum aestivum | TA81375_4565 | 247 | 248 | Full length |
| Triae_WRD23 II | Triticum aestivum | EA148218 | 249 | 250 | Full length |
| Vitvi_WDR23 | Vitis vinifera | EV236978.1, | 251 | 252 | Full length |
| | | CB002670, | | | |
| | | EV235943 | | | |
| Zeama_WDR23 | Zea mays | DT943774.1, | 253 | 254 | Full length |
| | | DV536181.1, | | | |
| | | EE042623.2 | | | |
| Zeama_WDR23 | Zea mays | CO527332.1, | 255 | 256 | Full length |
| II | | CF004625.1, | | | |
| | | EB408231.1, | | | |
| | | DV163655.1 | | | |
| Citsi_WDR23 | Citrus sinensis | DN620350, | 257 | 258 | Partial |
| | | CN186594.1 | | | |
| Glyma_WRD23 II | Glycine max | BQ741328.1, | 259 | 260 | Partial |
| | | BI471220.1, | | | |
| | | CX708493.1 | | | |
| Horvu_WDR23 I | Hordeum vulgare | BQ753299 | 261 | 262 | Partial |
| Horvu_WDR23 | Hordeum vulgare | BQ471803.1, | 263 | 264 | Partial |
| III | | BM370019.2 | | | |
| Pinta_WDR23 | Pinus taeda | CV034652, | 265 | 266 | Partial |
| | | CX652385 | | | |
| Sacof_WDR23 | Saccharum officinarum | CA146950, | 267 | 268 | Partial |
| | | CF570656 | | | |
| Sorbi_WDR23 | Sorghum bicolor | CB928406.1, | 269 | 270 | Partial |
| | | BE599991, | | | |
| | | CF770659.1 | | | |

[0511] Concerning the WDR23-like proteins, in some instances, related sequences have tentatively been assembled and publicly disclosed by research institutions, such as The Institute for Genomic Research (TIGR). The Eukaryotic Gene Orthologs (EGO) database may be used to identify such related sequences, either by keyword search or by using the BLAST algorithm with the nucleic acid sequence or polypeptide sequence of interest. On other instances, special nucleic acid sequence databases have been created for particular organisms, such as by the Joint Genome Institute. In still other instances, the sequences are obtained after a private, proprietary sequencing and assembly effort has been made, for example for Brassica napus, Helianthus annus and Linum usitatissum.

### Example 2

### Alignment of PATL PRP38, GATA-like, ADA2, and WDR23-like Polypeptide Sequences

[0512] Alignment of polypeptide sequences was performed using the AlignX programme from the Vector NTI (Invitrogen) which is based on the popular Clustal W algorithm of progressive alignment (Thompson et al. (1997) Nucleic Acids Res 25:4876-4882; Chenna et al. (2003). Nucleic Acids Res 31:3497-3500). Default values were: for the gap open penalty of 10, for the gap extension penalty of 0,1 and the selected weight matrix was Blosum 62 (if polypeptides are aligned). Sequence conservation among PATL polypeptides was higher at the C-terminus than at the N-terminus. A consensus sequence is given. Conserved amino acids are indicated. The PATL polypeptides are aligned in FIG. 2. Comparison of FIG. 1 and FIG. 2 revealed the presence of the conserved domains and key amino acid residues indicated in FIG. 1 in the PATL polypeptides of FIG. 2. A phylogenetic tree of PATL polypeptides (FIG. 3) was constructed using a neighbour-joining clustering algorithm as provided in the AlignX programme from the Vector NTI (Invitrogen).

[0513] Sequence conservation among PRP38 polypeptides was essentially in the N-terminal PRP38 domain of the polypeptides, the N-terminal domain usually being more variable in sequence length and composition, was enriched in acidic amino acids. The PRP38 polypeptides are aligned in FIG. 7. A phylogenetic tree of PRP38 polypeptides (FIG. 8) was constructed using a neighbour-joining clustering algorithm as provided in the AlignX programme from the Vector NTI (Invitrogen).

[0514] Sequence conservation among GATA-like polypeptides is essentially in the GATA domain of the polypeptides and in the C-terminus, the N-terminal domain usually being more variable in sequence length and composition. The GATA-like polypeptides are aligned in FIG. 12.

[0515] Sequence conservation among ADA2 polypeptides was essentially along the conserved Zn finger ZZ type, SANT DNA binding and SWIRM domains of the polypeptides. A consensus sequence is given. The Zn finger ZZ type domain was enriched in cystein residues. The ADA2 polypeptides are aligned in FIG. 16. A phylogenetic tree of ADA2 polypeptides (FIG. 17) was constructed using a neighbour-joining clustering algorithm as provided in the AlignX programme from the Vector NTI (Invitrogen).

[0516] Mutliple sequence alignment of the full length WDR23-like polypeptide sequences in Table A5 was performed using the AlignX algorithm (from Vector NTI 10.3, Invitrogen Corporation). Results of the alignment are shown in FIGS. 23 and 24 of the present application.

[0517] FIG. 23 shows a sequence alignment representing the D×R motifs conserved in two consecutive blades of the WD40, in the WRD23 from Homo sapiens (NCBI accession AK057636), Aspergillus niger (NCBI accession CAK40817) and the plant WRD23-like polypeptides of Table A5.

[0518] In FIG. 24, the beginning and the end of the Conserved Domain (CD), for example as represented by SEQ ID NO: 271, is shown using brackets. The WD40 repeats corresponding to PF00400 are marked by X's under the consensus sequence. The D×R motifs are also identified under the consensus sequence.

### Example 3

### Calculation of Global Percentage Identity Between Polypeptide Sequences Useful in Performing the Methods of the Invention

[0519] Global percentages of similarity and identity between full length polypeptide sequences useful in performing the methods of the invention were determined using one of the methods available in the art, the MatGAT (Matrix Global Alignment Tool) software (BMC Bioinformatics. 2003 4:29. MatGAT: an application that generates similarity/identity matrices using protein or DNA sequences. Campanella J J, Bitincka L, Smalley J; software hosted by Ledion Bitincka). MatGAT software generates similarity/identity matrices for DNA or protein sequences without needing pre-alignment of the data. The program performs a series of pair-wise alignments using the Myers and Miller global alignment algorithm (with a gap opening penalty of 12, and a gap extension penalty of 2), calculates similarity and identity using for example Blosum 62 (for polypeptides), and then places the results in a distance matrix. Sequence similarity is shown in the bottom half of the dividing line and sequence identity is shown in the top half of the diagonal dividing line.

Parameters used in the comparison were:
[0520] Scoring matrix: Blosum62
[0521] First Gap: 12
[0522] Extending gap: 2

[0523] Results of the software analysis are shown in Table B1 for the global similarity and identity over the full length of the polypeptide sequences. Percentage identity is given above the diagonal in bold and percentage similarity is given below the diagonal (normal face).

[0524] The percentage identity between the PATL polypeptide sequences useful in performing the methods of the invention can be as low as 23.7% amino acid identity compared to Orysa_PATL_{—}1 polypeptide (SEQ ID NO: 2).

TABLE B1
MatGAT results for global similarity and identity over the full length of the
polypeptide sequences.
Table B1: Sequence similarity between PATL polypeptides

| | 1 | 2 | 3 | 4 | 5 | 6 | 7 | 8 | 9 | 10 |
|---|---|---|---|---|---|---|---|---|---|---|
| 1. Zeama_PATL_2 | | 42.9 | 69.0 | 46.5 | 38.4 | 66.9 | 44.9 | 31.5 | 24.2 | 28.0 |
| 2. Zeama_PATL_3 | 45.8 | | 51.3 | 31.5 | 45.3 | 47.0 | 85.9 | 63.3 | 45.8 | 55.6 |
| 3. Zeama_PATL_4 | 76.1 | 52.0 | | 48.8 | 42.4 | 75.9 | 47.2 | 34.2 | 25.8 | 30.1 |
| 4. Glyma_PATL_2 | 63.9 | 40.4 | 64.9 | | 41.5 | 47.5 | 30.2 | 35.3 | 23.3 | 31.5 |
| 5. Glyma_PATL_3 | 48.9 | 56.1 | 53.2 | 53.0 | | 40.9 | 43.6 | 48.5 | 34.5 | 52.1 |
| 6. Triaes_PATL_2 | 75.8 | 49.4 | 82.1 | 62.5 | 52.6 | | 44.8 | 33.0 | 24.7 | 28.6 |
| 7. Triaes_PATL_3 | 47.7 | 91.0 | 50.1 | 38.9 | 54.7 | 48.2 | | 62.6 | 47.0 | 54.4 |
| 8. Glyma_PATL_1 | 38.9 | 79.6 | 42.6 | 42.2 | 57.8 | 41.4 | 76.3 | | 45.0 | 63.9 |
| 9. Zeama_PATL_1 | 33.9 | 65.4 | 35.9 | 33.8 | 47.2 | 36.1 | 65.7 | 67.8 | | 43.0 |
| 10. Brana_PATL_1 | 36.6 | 74.1 | 39.4 | 39.4 | 61.8 | 38.3 | 71.5 | 78.2 | 64.2 | |
| 11. Helan_PATL_1 | 29.5 | 61.8 | 32.9 | 31.8 | 51.9 | 31.5 | 59.6 | 63.9 | 52.8 | 68.1 |
| 12. Orysa_PATL_3 | 82.4 | 49.4 | 81.7 | 63.5 | 52.0 | 81.3 | 50.3 | 41.2 | 35.0 | 38.5 |
| 13. Orysa_PATL_4 | 53.5 | 41.2 | 56.7 | 55.3 | 52.2 | 56.4 | 40.8 | 41.6 | 40.0 | 38.1 |
| 14. Arath_PATL_1 | 57.7 | 37.0 | 62.7 | 60.1 | 50.4 | 59.3 | 36.0 | 38.7 | 32.3 | 37.9 |
| 15. Arath_PATL_2 | 52.4 | 47.8 | 57.3 | 57.3 | 70.8 | 56.2 | 46.3 | 49.8 | 41.0 | 61.4 |
| 16. Arath_PATL_3 | 57.0 | 30.0 | 52.9 | 59.0 | 43.5 | 53.1 | 30.3 | 32.1 | 29.0 | 31.9 |
| 17. Arath_PATL_4 | 42.9 | 49.9 | 46.4 | 44.7 | 61.6 | 45.7 | 49.9 | 51.6 | 65.5 | 50.1 |
| 18. Arath_PATL_5 | 55.8 | 39.1 | 58.1 | 59.1 | 52.8 | 57.6 | 40.6 | 40.7 | 36.3 | 40.0 |
| 19. Arath_PATL_6 | 56.3 | 35.6 | 55.2 | 60.5 | 51.6 | 53.4 | 34.9 | 36.8 | 30.2 | 39.1 |
| 20. Orysa_PATL1_1 | 80.6 | 48.6 | 83.4 | 63.5 | 49.8 | 84.8 | 47.5 | 40.3 | 33.9 | 37.5 |
| | 11 | 12 | 13 | 14 | 15 | 16 | 17 | 18 | 19 | 20 |
| 1. Zeama_PATL_2 | 22.8 | 77.3 | 41.1 | 43.5 | 39.3 | 43.4 | 29.0 | 40.6 | 40.2 | 72.5 |
| 2. Zeama_PATL_3 | 47.9 | 46.2 | 30.3 | 27.1 | 36.0 | 22.5 | 34.4 | 27.9 | 27.0 | 46.8 |
| 3. Zeama_PATL_4 | 25.9 | 73.4 | 41.3 | 46.3 | 42.4 | 39.6 | 30.9 | 41.6 | 39.1 | 80.0 |
| 4. Glyma_PATL_2 | 25.5 | 47.2 | 37.9 | 46.1 | 44.4 | 44.4 | 31.8 | 40.4 | 42.4 | 48.4 |
| 5. Glyma_PATL_3 | 43.6 | 41.2 | 36.2 | 35.2 | 57.6 | 30.2 | 41.9 | 34.8 | 41.3 | 39.0 |
| 6. Triaes_PATL_2 | 24.2 | 72.3 | 41.4 | 44.2 | 40.6 | 40.7 | 30.8 | 41.7 | 38.5 | 79.2 |
| 7. Triaes_PATL_3 | 46.8 | 47.8 | 31.2 | 26.5 | 35.4 | 22.5 | 33.8 | 29.0 | 26.0 | 44.3 |
| 8. Glyma_PATL_1 | 51.3 | 33.3 | 30.9 | 29.7 | 41.4 | 24.6 | 35.6 | 27.8 | 30.4 | 32.6 |
| 9. Zeama_PATL_1 | 38.7 | 25.0 | 27.9 | 19.6 | 27.4 | 17.1 | 53.9 | 23.5 | 20.8 | 23.7 |
| 10. Brana_PATL_1 | 57.0 | 28.9 | 27.3 | 27.4 | 59.4 | 22.4 | 36.1 | 27.0 | 34.3 | 28.0 |
| 11. Helan_PATL_1 | | 24.1 | 23.2 | 19.9 | 35.4 | 16.9 | 28.6 | 22.3 | 26.9 | 23.7 |
| 12. Orysa_PATL_3 | 31.5 | | 42.5 | 45.2 | 39.7 | 41.2 | 30.2 | 41.6 | 39.1 | 77.0 |
| 13. Orysa_PATL_4 | 33.7 | 56.6 | | 34.8 | 38.1 | 32.9 | 35.2 | 49.7 | 32.6 | 41.3 |
| 14. Arath_PATL_1 | 28.4 | 61.0 | 52.7 | | 38.5 | 58.3 | 27.6 | 39.1 | 35.9 | 44.2 |
| 15. Arath_PATL_2 | 42.9 | 54.4 | 54.2 | 55.3 | | 35.9 | 38.7 | 37.2 | 47.6 | 39.9 |
| 16. Arath_PATL_3 | 24.6 | 54.2 | 48.2 | 66.8 | 49.0 | | 24.8 | 36.1 | 35.7 | 41.3 |
| 17. Arath_PATL_4 | 40.6 | 45.0 | 50.3 | 43.5 | 56.3 | 37.9 | | 31.8 | 29.4 | 28.7 |
| 18. Arath_PATL_5 | 32.8 | 56.9 | 67.6 | 57.4 | 59.4 | 52.0 | 48.7 | | 33.1 | 40.4 |
| 19. Arath_PATL_6 | 31.9 | 53.4 | 46.6 | 50.9 | 58.2 | 55.3 | 40.4 | 50.6 | | 38.7 |
| 20. Orysa_PATL1_1 | 30.7 | 82.5 | 54.5 | 58.6 | 54.0 | 54.8 | 44.0 | 55.8 | 54.5 | |

[0525] Concerning the PRP38 polypeptides, results of the AlignX software analysis are shown in Table B2 for the global identity over the full length of selected polypeptide sequences from Table A2 compared to the Arath_PRP38_{—}1 polypeptide (Table A2).

TABLE B2
Sequence similarity between PRP38 polypeptides

| | % sequence similarity |
|---|---|
| PRP38 polypeptide | to SEQ ID N0: 77 |
| Arath_PRP38_5 | 23.6 |
| brasy_PRP38_1 | 63.5 |
| brasy_PRP38_2 | 32.1 |
| Chlre_PRP38_1 | 40.6 |
| Horvu_PRP38_1 | 56.1 |
| Lyces_PRP38_1 | 60.7 |
| Medtr_PRP38_1 | 25.4 |
| Orysa_PRP38_1 | 60.9 |
| Orysa_PRP38_2 | 25.9 |

[0526] The percentage identity between the PRP38 polypeptide sequences of Table B2 and useful in performing the methods of the invention can be as low as 23.6% amino acid identity compared to SEQ ID NO: 77.

[0527] Concerning the GATA-like proteins, parameters used in the comparison were:
[0528] Scoring matrix: Blosum62
[0529] First Gap: 11
[0530] Extending gap: 1

[0531] Results of the software analysis are shown in Table B3 for the global similarity and identity over the full length of the polypeptide sequences. Percentage identity is given above the diagonal in bold and percentage similarity is given below the diagonal (normal face).

[0532] The percentage identity between the GATA-like polypeptide sequences useful in performing the methods of the invention can be as low as 14% amino acid identity compared to SEQ ID NO: 129.

TABLE B3
MatGAT results for global similarity and identity
over the full length of the polypeptide sequences.

| | 1 | 2 | 3 | 4 | 5 | 6 | 7 | 8 | 9 | 10 | 11 |
|---|---|---|---|---|---|---|---|---|---|---|---|
| 1. GATAp | | 20.6 | 28.1 | 14.2 | 17.8 | 25.7 | 26.2 | 45.1 | 17.5 | 43.7 | 43.9 |
| 2. Q8LC79 | 33.7 | | 23.4 | 16.2 | 17.6 | 21.0 | 21.3 | 17.9 | 15.3 | 19.5 | 18.4 |
| 3. CAB79470 | 45.9 | 37.2 | | 16.8 | 17.3 | 52.8 | 29.5 | 28.3 | 16.5 | 28.1 | 27.3 |
| 4. Q8LC59 | 20.1 | 21.4 | 23.0 | | 39.6 | 14.6 | 28.4 | 14.4 | 38.4 | 15.0 | 14.5 |
| 5. A0JPW8 | 24.9 | 23.7 | 25.3 | 51.8 | | 17.8 | 30.5 | 16.3 | 42.5 | 17.9 | 16.4 |
| 6. Q1EBW4 | 42.0 | 34.2 | 65.3 | 18.8 | 23.9 | | 27.8 | 27.9 | 16.6 | 27.3 | 28.7 |
| 7. CAN63090 | 35.4 | 32.2 | 39.2 | 36.5 | 39.8 | 36.4 | | 23.0 | 30.7 | 22.2 | 23.8 |
| 8. A3BCY3 | 55.7 | 32.8 | 44.3 | 20.0 | 23.2 | 42.0 | 30.1 | | 16.5 | 85.1 | 97.9 |
| 9. A2XNM3 | 23.2 | 22.7 | 23.3 | 52.2 | 63.3 | 22.4 | 38.9 | 21.6 | | 18.2 | 16.7 |
| 10. Q5Z624 | 56.7 | 35.7 | 44.6 | 21.9 | 25.1 | 37.9 | 30.3 | 88.5 | 23.3 | | 83.3 |
| 11. A2YE96 | 56.7 | 32.5 | 42.5 | 21.0 | 23.4 | 42.7 | 30.6 | 98.4 | 21.8 | 87.9 | |
| 12. A2X2I3 | 98.3 | 34.9 | 48.0 | 21.9 | 26.5 | 42.0 | 36.0 | 56.8 | 23.9 | 58.5 | 57.3 |
| 13. Q5JNB8 | 23.5 | 23.1 | 25.6 | 52.1 | 57.0 | 23.4 | 38.4 | 22.9 | 74.6 | 22.5 | 23.7 |
| 14. A3A4M7 | 97.7 | 34.2 | 46.3 | 21.2 | 25.4 | 41.5 | 35.6 | 56.0 | 23.4 | 57.3 | 56.5 |
| 15. A5BCR3 | 20.7 | 21.0 | 25.3 | 66.4 | 69.8 | 22.4 | 38.4 | 21.1 | 66.2 | 22.5 | 21.0 |
| 16. CAO65359 | 32.6 | 32.2 | 32.4 | 38.7 | 45.3 | 33.9 | 58.8 | 32.0 | 42.0 | 31.4 | 31.7 |
| 17. AAL38250 | 42.0 | 34.4 | 65.1 | 19.6 | 23.4 | 99.7 | 36.7 | 41.2 | 22.1 | 38.9 | 41.2 |
| 18. AAM63829 | 20.1 | 21.4 | 23.3 | 100.0 | 51.8 | 19.3 | 37.9 | 20.0 | 52.2 | 21.9 | 21.0 |
| 19. ABK28715 | 20.1 | 21.4 | 23.6 | 99.2 | 51.8 | 19.6 | 37.9 | 20.0 | 52.9 | 21.9 | 21.0 |
| 20. AAB61058 | 25.6 | 21.8 | 27.5 | 21.8 | 15.8 | 30.0 | 20.2 | 24.4 | 14.9 | 26.4 | 26.2 |
| 21. CAO44870 | 21.8 | 22.0 | 23.3 | 60.0 | 59.7 | 20.6 | 37.4 | 20.0 | 56.6 | 21.0 | 20.4 |

| | 12 | 13 | 14 | 15 | 16 | 17 | 18 | 19 | 20 | 21 |
|---|---|---|---|---|---|---|---|---|---|---|
| 1. GATAp | 98.3 | 18.6 | 97.2 | 15.9 | 26.5 | 25.7 | 14.2 | 14.1 | 14.2 | 15.6 |
| 2. Q8LC79 | 21.7 | 16.1 | 21.4 | 14.6 | 19.4 | 21.0 | 16.2 | 16.2 | 13.7 | 17.3 |
| 3. CAB79470 | 29.6 | 18.6 | 28.3 | 18.7 | 27.2 | 52.5 | 16.5 | 16.7 | 15.4 | 15.9 |
| 4. Q8LC59 | 15.0 | 36.1 | 14.4 | 47.4 | 28.2 | 15.2 | 99.2 | 99.2 | 21.6 | 42.5 |
| 5. A0JPW8 | 17.6 | 42.5 | 16.2 | 54.2 | 34.2 | 17.1 | 39.6 | 39.3 | 10.9 | 52.5 |
| 6. Q1EBW4 | 25.1 | 16.8 | 25.6 | 16.5 | 26.8 | 99.7 | 15.2 | 15.4 | 18.2 | 14.8 |
| 7. CAN63090 | 26.3 | 30.2 | 25.9 | 29.4 | 51.2 | 27.0 | 25.1 | 25.0 | 13.1 | 27.4 |
| 8. A3BCY3 | 44.9 | 17.9 | 43.4 | 14.7 | 23.7 | 27.8 | 14.4 | 14.4 | 13.5 | 16.0 |
| 9. A2XNM3 | 18.3 | 65.5 | 18.4 | 46.1 | 31.5 | 16.6 | 38.4 | 38.8 | 11.1 | 45.3 |
| 10. Q5Z624 | 44.2 | 19.8 | 43.4 | 15.3 | 21.7 | 27.7 | 15.0 | 14.9 | 14.8 | 16.4 |
| 11. A2YE96 | 44.9 | 18.8 | 43.4 | 14.8 | 23.9 | 29.0 | 14.5 | 14.5 | 14.0 | 16.1 |
| 12. A2X2I3 | | 19.0 | 95.5 | 16.4 | 26.9 | 25.8 | 14.4 | 14.4 | 14.4 | 15.9 |
| 13. Q5JNB8 | 23.9 | | 18.1 | 45.1 | 33.7 | 17.6 | 35.6 | 36.1 | 9.5 | 43.0 |
| 14. A3A4M7 | 96.0 | 22.9 | | 15.8 | 26.2 | 25.3 | 13.6 | 13.5 | 13.9 | 15.5 |
| 15. A5BCR3 | 21.6 | 57.7 | 20.6 | | 30.2 | 16.5 | 45.9 | 45.5 | 10.8 | 51.9 |
| 16. CAO65359 | 33.7 | 45.3 | 32.2 | 40.9 | | 26.6 | 28.2 | 28.6 | 11.5 | 28.7 |
| 17. AAL38250 | 43.2 | 24.4 | 41.7 | 22.4 | 33.7 | | 15.2 | 15.4 | 18.2 | 14.8 |
| 18. AAM63829 | 20.2 | 50.7 | 19.5 | 63.2 | 38.7 | 19.6 | | 98.3 | 21.5 | 42.5 |
| 19. ABK28715 | 20.2 | 51.4 | 19.5 | 63.2 | 39.2 | 19.8 | 99.2 | | 21.6 | 42.2 |
| 20. AAB61058 | 25.5 | 14.2 | 25.3 | 14.7 | 16.5 | 30.2 | 21.8 | 21.8 | | 10.2 |
| 21. CAO44870 | 22.2 | 52.8 | 21.2 | 67.2 | 39.8 | 20.6 | 60.0 | 59.5 | 13.6 | |

Concerning the ADA2 polypeptides, parameters used in the comparison were:
[0533] Scoring matrix: Blosum62
[0534] First Gap: 12
[0535] Extending gap: 2

[0536] Results of the software analysis are shown in Table B4 for the global similarity and identity over the full length of the polypeptide sequences. Percentage identity is given above the diagonal in bold and percentage similarity is given below the diagonal (normal face).

[0537] The percentage identity between the ADA2 polypeptide sequences useful in performing the methods of the invention can be as low as 21.2% amino acid identity compared to Arath_ADA2_{—}1 polypeptide (SEQ ID NO: 182).

TABLE B4
MatGAT results for global similarity and identity over the full length of the
polypeptide sequences.
Table B4: Sequence similarity between ADA2 polypeptides

| Name | 1 | 2 | 3 | 4 | 5 | 6 | 7 | 8 | 9 | 10 | 11 | 12 | 13 |
|---|---|---|---|---|---|---|---|---|---|---|---|---|---|
| 1. Lyces_ADA2_2 | | 55.3 | 21.2 | 52.7 | 49.2 | 57.3 | 57.1 | 61.6 | 56.7 | 57.3 | 58.6 | 57.9 | 33.5 |
| 2. Lyces_ADA2_1 | 73.2 | | 19.7 | 57.0 | 46.1 | 54.5 | 53.8 | 54.0 | 65.0 | 65.4 | 52.4 | 54.6 | 33.1 |
| 3. Dicdi_ADA2_1 | 33.2 | 32.5 | | 19.9 | 21.2 | 22.6 | 22.4 | 22.7 | 19.6 | 19.9 | 23.3 | 22.5 | 20.4 |
| 4. Arath_ADA2_2 | 69.1 | 71.6 | 31.3 | | 45.2 | 50.8 | 51.1 | 50.4 | 59.4 | 61.0 | 51.2 | 51.3 | 35.2 |
| 5. Arath_ADA2_1 | 68.9 | 65.3 | 32.7 | 63.1 | | 49.2 | 48.9 | 52.0 | 47.8 | 48.2 | 54.9 | 49.3 | 33.7 |
| 6. Zeama_ADA_2 | 72.0 | 69.6 | 35.4 | 66.2 | 65.8 | | 94.7 | 58.4 | 58.0 | 58.1 | 54.0 | 87.7 | 34.3 |
| 7. Zeama_ADA_1 | 72.7 | 69.4 | 34.6 | 66.5 | 66.7 | 97.0 | | 58.4 | 58.3 | 57.9 | 54.0 | 88.9 | 35.0 |
| 8. Vitvi_ADA2_1 | 78.4 | 68.4 | 34.9 | 66.3 | 67.2 | 74.7 | 74.3 | | 59.1 | 59.6 | 62.3 | 59.2 | 33.1 |
| 9. Poptr_ADA2_1 | 73.9 | 77.5 | 32.5 | 72.0 | 68.6 | 72.9 | 73.3 | 74.3 | | 87.9 | 55.1 | 58.0 | 33.3 |
| 10. Poptr_ADA2_3 | 74.5 | 78.0 | 32.6 | 73.5 | 66.5 | 73.6 | 73.8 | 75.0 | 93.8 | | 54.5 | 56.9 | 32.8 |
| 11. Poptr_ADA2_2 | 76.3 | 69.8 | 34.2 | 69.3 | 71.0 | 70.3 | 70.1 | 75.0 | 71.3 | 71.9 | | 55.2 | 33.2 |
| 12. Orysa_ADA2_1 | 72.5 | 68.6 | 34.5 | 66.8 | 66.5 | 93.7 | 94.4 | 75.4 | 73.4 | 73.4 | 70.4 | | 35.8 |
| 13. Ostlu_ADA2_1 | 53.0 | 54.7 | 34.4 | 52.8 | 53.5 | 54.2 | 54.2 | 52.2 | 52.3 | 51.5 | 55.6 | 53.8 | |

[0538] Concerning the WDR23-like proteins, parameters used in the comparison were:
[0539] Scoring matrix: Blosum62
[0540] First Gap: 12
[0541] Extending gap: 2

[0542] Results of the software analysis are shown in Table B5 for the global similarity and identity over the full length of the polypeptide sequences (excluding the partial polypeptide sequences).

TABLE B5
MatGAT results for global similarity and identity over the full length of the polypeptide sequences of Table A5.

| | 1 | 2 | 3 | 4 | 5 | 6 | 7 | 8 | 9 | 10 | 11 | 12 | 13 | 14 | 15 | 16 | 17 | 18 | 19 | 20 | 21 |
|---|---|---|---|---|---|---|---|---|---|---|---|---|---|---|---|---|---|---|---|---|---|
| 1. Aqufo_WDR23 | | 74 | 75 | 67 | 86 | 67 | 59 | 72 | 66 | 70 | 70 | 61 | 71 | 77 | 68 | 54 | 61 | 58 | 78 | 60 | 54 |
| 2. Brana_WDR23 | 83 | | 93 | 68 | 74 | 66 | 55 | 75 | 66 | 71 | 71 | 58 | 71 | 77 | 66 | 53 | 58 | 55 | 75 | 56 | 52 |
| 3. Arath_WDR23 | 84 | 96 | | 68 | 75 | 67 | 56 | 75 | 66 | 71 | 70 | 58 | 72 | 78 | 66 | 54 | 58 | 56 | 76 | 56 | 54 |
| 4. Glyma_WDR23 | 78 | 79 | 80 | | 68 | 60 | 56 | 67 | 66 | 67 | 66 | 58 | 66 | 69 | 70 | 53 | 57 | 56 | 69 | 57 | 53 |
| 5. Goshi_WDR23 | 91 | 85 | 85 | 79 | | 67 | 58 | 73 | 65 | 70 | 71 | 59 | 73 | 76 | 66 | 52 | 59 | 56 | 76 | 59 | 52 |
| 6. Helan_WDR23 | 82 | 80 | 81 | 76 | 81 | | 53 | 66 | 63 | 68 | 61 | 54 | 65 | 68 | 60 | 49 | 54 | 54 | 68 | 52 | 51 |
| 7. Horvu_WDR23 | 72 | 69 | 69 | 69 | 71 | 68 | | 56 | 53 | 54 | 53 | 55 | 56 | 56 | 56 | 70 | 56 | 93 | 55 | 56 | 72 |
| 8. Linus_WDR23 | 82 | 85 | 86 | 78 | 85 | 79 | 69 | | 67 | 68 | 69 | 59 | 71 | 78 | 64 | 50 | 59 | 56 | 74 | 57 | 51 |
| 9. Liter_WDR23 | 79 | 80 | 81 | 80 | 80 | 78 | 69 | 80 | | 66 | 64 | 59 | 66 | 68 | 65 | 50 | 59 | 53 | 69 | 58 | 51 |
| 10. Lyces_WDR23 | 84 | 84 | 85 | 81 | 85 | 81 | 69 | 82 | 81 | | 66 | 59 | 70 | 73 | 63 | 53 | 57 | 55 | 75 | 56 | 52 |
| 11. Medtr_WDR23 | 83 | 84 | 84 | 79 | 84 | 78 | 69 | 82 | 78 | 82 | | 58 | 70 | 73 | 66 | 50 | 58 | 53 | 71 | 58 | 51 |
| 12. Orysa_WDR23 | 75 | 72 | 73 | 73 | 74 | 72 | 70 | 71 | 75 | 75 | 73 | | 60 | 60 | 59 | 51 | 83 | 56 | 60 | 80 | 52 |
| 13. Pinra_WDR23 | 80 | 81 | 82 | 78 | 83 | 78 | 68 | 82 | 78 | 82 | 84 | 73 | | 74 | 65 | 51 | 57 | 55 | 75 | 58 | 52 |
| 14. Poptr_WDR23 | 84 | 86 | 87 | 80 | 86 | 81 | 68 | 87 | 80 | 84 | 84 | 74 | 82 | | 67 | 52 | 59 | 55 | 78 | 58 | 52 |
| 15. Pruar_WDR23 | 79 | 77 | 78 | 81 | 77 | 74 | 70 | 76 | 78 | 77 | 77 | 73 | 77 | 79 | | 52 | 59 | 55 | 69 | 58 | 53 |
| 16. Sacof_WDR23 | 68 | 68 | 68 | 69 | 66 | 68 | 81 | 67 | 67 | 70 | 68 | 66 | 66 | 67 | 68 | | 53 | 69 | 51 | 51 | 89 |
| 17. Triae_WDR23 | 74 | 70 | 71 | 71 | 72 | 72 | 69 | 72 | 75 | 72 | 72 | 92 | 71 | 72 | 71 | 67 | | 57 | 59 | 76 | 53 |
| 18. Triae_WDR23 | 71 | 69 | 70 | 70 | 69 | 70 | 96 | 70 | 70 | 69 | 69 | 72 | 69 | 69 | 71 | 82 | 70 | | 57 | 56 | 71 |
| 19. Vitis_WDR23 | 87 | 86 | 87 | 82 | 87 | 83 | 70 | 86 | 82 | 86 | 85 | 76 | 85 | 88 | 82 | 67 | 74 | 72 | | 60 | 51 |
| 20. Zeama_WDR23 | 73 | 70 | 72 | 71 | 72 | 69 | 70 | 70 | 74 | 72 | 72 | 89 | 72 | 72 | 70 | 68 | 87 | 70 | 74 | | 53 |
| 21. Zeama_WDR23 | 69 | 68 | 69 | 70 | 68 | 68 | 83 | 67 | 69 | 70 | 68 | 67 | 67 | 67 | 70 | 93 | 67 | 83 | 69 | 69 | |

TABLE B5.1
MatGAT results for global similarity and identity over the Conserved Domain of the polypeptide sequences of Table A5.

| | 1 | 2 | 3 | 4 | 5 | 6 | 7 | 8 | 9 | 10 | 11 | 12 | 13 | 14 | 15 | 16 | 17 | 18 | 19 | 20 | 21 |
|---|---|---|---|---|---|---|---|---|---|---|---|---|---|---|---|---|---|---|---|---|---|
| 1. CD_Aqufo_WDR23 | | 82 | 81 | 77 | 85 | 76 | 73 | 79 | 77 | 81 | 80 | 74 | 81 | 85 | 78 | 68 | 73 | 72 | 86 | 73 | 68 |
| 2. CD_Arath_WDR23 | 91 | | 96 | 77 | 81 | 74 | 70 | 80 | 77 | 80 | 79 | 70 | 80 | 84 | 76 | 69 | 71 | 70 | 81 | 69 | 69 |
| 3. CD_Brana_WDR23 | 89 | 98 | | 76 | 81 | 72 | 69 | 81 | 76 | 79 | 79 | 70 | 79 | 83 | 75 | 66 | 70 | 69 | 81 | 69 | 66 |
| 4. CD_Glyma_WDR23 | 87 | 88 | 87 | | 76 | 68 | 68 | 76 | 75 | 75 | 75 | 69 | 76 | 78 | 76 | 64 | 68 | 68 | 77 | 70 | 64 |
| 5. CD_Goshi_WDR23 | 90 | 90 | 90 | 87 | | 74 | 70 | 81 | 75 | 79 | 81 | 71 | 83 | 83 | 76 | 65 | 71 | 70 | 82 | 72 | 65 |
| 6. CD_Helan_WDR23 | 88 | 87 | 85 | 82 | 87 | | 66 | 74 | 73 | 75 | 70 | 66 | 73 | 76 | 69 | 63 | 66 | 66 | 75 | 65 | 64 |
| 7. CD_Horvu_WDR23\II | 84 | 83 | 82 | 81 | 82 | 80 | | 69 | 65 | 68 | 66 | 68 | 71 | 70 | 68 | 79 | 69 | 97 | 69 | 69 | 80 |
| 8. CD_Linus_WDR23 | 88 | 91 | 90 | 88 | 90 | 85 | 81 | | 76 | 77 | 79 | 71 | 79 | 86 | 74 | 63 | 72 | 69 | 81 | 70 | 65 |
| 9. CD_Liter_WDR23 | 87 | 89 | 88 | 86 | 88 | 85 | 80 | 88 | | 75 | 75 | 70 | 76 | 79 | 73 | 62 | 69 | 65 | 77 | 69 | 63 |
| 10. CD_Lyces_WDR23 | 90 | 90 | 89 | 88 | 90 | 88 | 82 | 87 | 88 | | 76 | 71 | 79 | 81 | 74 | 66 | 70 | 69 | 82 | 70 | 66 |
| 11. CD_Medtr_WDR23 | 90 | 91 | 90 | 87 | 91 | 86 | 80 | 89 | 88 | 90 | | 70 | 80 | 83 | 77 | 65 | 70 | 66 | 80 | 69 | 65 |
| 12. CD_Orysa_WDR23 | 86 | 85 | 84 | 84 | 85 | 82 | 81 | 82 | 85 | 86 | 85 | | 72 | 72 | 70 | 64 | 89 | 68 | 72 | 87 | 66 |
| 13. CD_Pinra_WDR23 | 88 | 88 | 87 | 87 | 90 | 85 | 82 | 87 | 87 | 89 | 92 | 84 | | 83 | 76 | 66 | 71 | 70 | 82 | 71 | 66 |
| 14. CD_Poptr_WDR23 | 91 | 92 | 91 | 87 | 90 | 86 | 81 | 93 | 88 | 90 | 92 | 85 | 89 | | 77 | 66 | 73 | 70 | 85 | 71 | 67 |
| 15. CD_Pruar_WDR23 | 87 | 86 | 85 | 87 | 85 | 83 | 81 | 85 | 84 | 87 | 87 | 82 | 85 | 86 | | 64 | 70 | 68 | 77 | 70 | 66 |
| 16. CD_Sacof_WDR23\II | 80 | 80 | 78 | 79 | 77 | 79 | 88 | 78 | 77 | 81 | 78 | 79 | 79 | 79 | 78 | | 66 | 78 | 64 | 64 | 94 |
| 17. CD_Triae_WDR23 | 87 | 84 | 83 | 83 | 85 | 83 | 81 | 85 | 85 | 85 | 85 | 96 | 84 | 84 | 81 | 79 | | 70 | 71 | 85 | 66 |
| 18. CD_Triae_WDR23\II | 84 | 83 | 82 | 81 | 82 | 81 | 99 | 82 | 80 | 82 | 81 | 82 | 82 | 81 | 81 | 88 | 81 | | 70 | 69 | 80 |
| 19. CD_Vitvi_WDR23 | 93 | 91 | 90 | 89 | 91 | 88 | 82 | 91 | 90 | 92 | 92 | 86 | 91 | 92 | 88 | 79 | 87 | 83 | | 73 | 65 |
| 20. CD_Zeama_WDR23 | 85 | 83 | 82 | 82 | 84 | 81 | 81 | 81 | 83 | 84 | 84 | 93 | 84 | 84 | 80 | 80 | 93 | 81 | 86 | | 66 |
| 21. CD_Zeama_WDR23_II | 82 | 82 | 81 | 81 | 79 | 80 | 89 | 80 | 80 | 83 | 79 | 80 | 80 | 81 | 80 | 97 | 79 | 89 | 81 | 81 | |

[0543] The same analysis was done between the Conserved Domain (CD) as represented by SEQ ID NO: 271 (and comprised in SEQ ID NO: 216), and the Conserved Domain of the full length polypeptides of Table A5 (as highlighted in FIG. 24), and results are shown in Table B5.1.

[0544] The percentage identity between the full length polypeptide sequences useful in performing the methods of the invention can be as low as 54% amino acid identity compared to SEQ ID NO: 216.

[0545] The percentage identity between the Conserved Domain (CD) as represented by SEQ ID NO: 271 (and comprised in SEQ ID NO: 216), and the Conserved Domain of the polypeptides of Table A5 (as highlighted in FIG. 24) increases to 69% amino acid identity, as shown in Table B5.1.

### Example 4

### Identification of Domains Comprised in Polypeptide Sequences Useful in Performing the Methods of the Invention

[0546] Conserved domain proteins were identified by searching the InterPro database. The Integrated Resource of Protein Families, Domains and Sites (InterPro) database is an integrated interface for the commonly used signature databases for text- and sequence-based searches. The InterPro database combines these databases, which use different methodologies and varying degrees of biological information about well-characterized proteins to derive protein signatures. Collaborating databases include SWISS-PROT, PROSITE, TrEMBL, Panther, PRINTS, ProDom and Pfam, Smart and TIGRFAMs. Pfam is a large collection of multiple sequence alignments and hidden Markov models covering many common protein domains and families. Pfam is hosted at the Sanger Institute server in the United Kingdom. Interpro is hosted at the European Bioinformatics Institute in the United Kingdom.

[0547] The results of the InterPro scan of the polypeptide sequence as represented by SEQ ID NO: 2 are presented in Table C5.

TABLE C5
InterPro scan results (major accession numbers) of the polypeptide sequence as
represented by SEQ ID NO: 2.

| | Interpro | Other | | | | Amino acid | Amino acid | |
|---|---|---|---|---|---|---|---|---|
| | accession | database | | Short name | | coordinate: | coordinate: | |
| Query sequence | number | accession | Description domain | domain | Evalue | Start | End | Method |
| Orysa_PATL1_1 | IPR000348 | PF01105 | emp24/gp25L/p24 | EMP24_GP25L | 1.7E−17 | 525 | 606 | HMMPfam |
| Orysa_PATL1_1 | IPR001251 | PF00650 | Cellular retinaldehyde- | CRAL_TRIO | 7.5E−14 | 336 | 507 | HMMPfam |
| | | | binding/triple function, | | | | | |
| | | | C-terminal | | | | | |
| Orysa_PATL1_1 | IPR001251 | SM00516 | Cellular retinaldehyde- | SEC14 | 3.1E−36 | 328 | 496 | HMMSmart |
| | | | binding/triple function, | | | | | |
| | | | C-terminal | | | | | |
| Orysa_PATL1_1 | IPR001251 | PS50191 | Cellular retinaldehyde- | CRAL_TRIO | 17.735 | 324 | 499 | ProfileScan |
| | | | binding/triple function, | | | | | |
| | | | C-terminal | | | | | |
| Orysa_PATL1_1 | IPR001251 | SSF52087 | Cellular retinaldehyde- | CRAL_TRIO_C | 1.06E−12 | 334 | 500 | superfamily |
| | | | binding/triple function, | | | | | |
| | | | C-terminal | | | | | |
| Orysa_PATL1_1 | IPR008273 | PF03765 | Cellular retinaldehyde- | CRAL_TRIO_N | 0.00024 | 206 | 321 | HMMPfam |
| | | | binding/triple function, | | | | | |
| | | | N-terminal | | | | | |
| Orysa_PATL1_1 | IPR009038 | PS50866 | GOLD | GOLD | 10.429 | 505 | 606 | ProfileScan |
| Orysa_PATL1_1 | IPR011074 | SSF46938 | Phosphatidylinositol | Sec14p_like_N | 2.57E−12 | 271 | 325 | superfamily |
| | | | transfer protein-like, | | | | | |
| | | | N-terminal | | | | | |
| Orysa_PATL1_2 | IPR000348 | PF01105 | emp24/gp25L/p24 | EMP24_GP25L | 4.7 | 348 | 430 | HMMPfam |
| Orysa_PATL1_2 | IPR001071 | PR00180 | Cellular retinaldehyde | CRETINALDHBP | 1.6E−05 | 111 | 133 | FPrintScan |
| | | | binding/alpha- | | | | | |
| | | | tocopherol transport | | | | | |
| Orysa_PATL1_2 | IPR001071 | PR00180 | Cellular retinaldehyde | CRETINALDHBP | 1.6E−05 | 273 | 292 | FPrintScan |
| | | | binding/alpha- | | | | | |
| | | | tocopherol transport | | | | | |
| Orysa_PATL1_2 | IPR001251 | PF00650 | Cellular retinaldehyde- | CRAL_TRIO | 1.3E−19 | 244 | 317 | HMMPfam |
| | | | binding/triple function, | | | | | |
| | | | C-terminal | | | | | |
| Orysa_PATL1_2 | IPR001251 | SM00516 | Cellular retinaldehyde- | SEC14 | 3.00E−39 | 154 | 318 | HMMSmart |
| | | | binding/triple function, | | | | | |
| | | | C-terminal | | | | | |
| Orysa_PATL1_2 | IPR001251 | PS50191 | Cellular retinaldehyde- | CRAL_TRIO | 17.846 | 147 | 321 | ProfileScan |
| | | | binding/triple function, | | | | | |
| | | | C-terminal | | | | | |
| Orysa_PATL1_2 | IPR001251 | SSF52087 | Cellular retinaldehyde- | CRAL_TRIO_C | 1.2E−33 | 149 | 319 | superfamily |
| | | | binding/triple function, | | | | | |
| | | | C-terminal | | | | | |
| Orysa_PATL1_2 | IPR008273 | PF03765 | Cellular retinaldehyde- | CRAL_TRIO_N | 0.0037 | 52 | 145 | HMMPfam |
| | | | binding/triple function, | | | | | |
| | | | N-terminal | | | | | |
| Orysa_PATL1_2 | IPR009038 | PS50866 | GOLD | GOLD | 9.253 | 297 | 432 | ProfileScan |
| Orysa_PATL1_2 | IPR011074 | SSF46938 | Phosphatidylinositol | Sec14p_like_N | 2.6E−12 | 32 | 148 | superfamily |
| | | | transfer protein-like, | | | | | |
| | | | N-terminal | | | | | |
| Orysa_PATL1_3 | IPR000348 | PF01105 | emp24/gp25L/p24 | EMP24_GP25L | 2.3E−16 | 496 | 578 | HMMPfam |
| Orysa_PATL1_3 | IPR001071 | PR00180 | Cellular retinaldehyde | CRETINALDHBP | 6.9E−06 | 258 | 280 | FPrintScan |
| | | | binding/alpha- | | | | | |
| | | | tocopherol transport | | | | | |
| Orysa_PATL1_3 | IPR001071 | PR00180 | Cellular retinaldehyde | CRETINALDHBP | 6.9E−06 | 389 | 410 | FPrintScan |
| | | | binding/alpha- | | | | | |
| | | | tocopherol transport | | | | | |
| Orysa_PATL1_3 | IPR001071 | PR00180 | Cellular retinaldehyde | CRETINALDHBP | 6.9E−06 | 422 | 441 | FPrintScan |
| | | | binding/alpha- | | | | | |
| | | | tocopherol transport | | | | | |
| Orysa_PATL1_3 | IPR001251 | PF00650 | Cellular retinaldehyde- | CRAL_TRIO | 1.5E−14 | 307 | 471 | HMMPfam |
| | | | binding/triple function, | | | | | |
| | | | C-terminal | | | | | |
| Orysa_PATL1_3 | IPR001251 | SM00516 | Cellular retinaldehyde- | SEC14 | 2.8E−36 | 299 | 467 | HMMSmart |
| | | | binding/triple function, | | | | | |
| | | | C-terminal | | | | | |
| Orysa_PATL1_3 | IPR001251 | PS50191 | Cellular retinaldehyde- | CRAL_TRIO | 17.567 | 295 | 470 | ProfileScan |
| | | | binding/triple function, | | | | | |
| | | | C-terminal | | | | | |
| Orysa_PATL1_3 | IPR001251 | SSF52087 | Cellular retinaldehyde- | CRAL_TRIO_C | 1.00E−29 | 296 | 469 | superfamily |
| | | | binding/triple function, | | | | | |
| | | | C-terminal | | | | | |
| Orysa_PATL1_3 | IPR008273 | PF03765 | Cellular retinaldehyde- | CRAL_TRIO_N | 0.0011 | 189 | 292 | HMMPfam |
| | | | binding/triple function, | | | | | |
| | | | N-terminal | | | | | |
| Orysa_PATL1_3 | IPR009038 | PS50866 | GOLD | GOLD | 11.168 | 472 | 578 | ProfileScan |
| Orysa_PATL1_3 | IPR011074 | SSF46938 | Phosphatidylinositol | Sec14p_like_N | 4.3E−10 | 241 | 295 | superfamily |
| | | | transfer protein-like, | | | | | |
| | | | N-terminal | | | | | |
| Orysa_PATL1_4 | IPR000348 | PF01105 | emp24/gp25L/p24 | EMP24_GP25L | 2.4E−05 | 429 | 509 | HMMPfam |
| Orysa_PATL1_4 | IPR001071 | PR00180 | Cellular retinaldehyde | CRETINALDHBP | 1.1E−05 | 184 | 206 | FPrintScan |
| | | | binding/alpha- | | | | | |
| | | | tocopherol transport | | | | | |
| Orysa_PATL1_4 | IPR001071 | PR00180 | Cellular retinaldehyde | CRETINALDHBP | 1.1E−05 | 387 | 396 | FPrintScan |
| | | | binding/alpha- | | | | | |
| | | | tocopherol transport | | | | | |
| Orysa_PATL1_4 | IPR001251 | PF00650 | Cellular retinaldehyde- | CRAL_TRIO | 8.9E−17 | 323 | 423 | HMMPfam |
| | | | binding/triple function, | | | | | |
| | | | C-terminal | | | | | |
| Orysa_PATL1_4 | IPR001251 | SM00516 | Cellular retinaldehyde- | SEC14 | 5.5E−34 | 230 | 398 | HMMSmart |
| | | | binding/triple function, | | | | | |
| | | | C-terminal | | | | | |
| Orysa_PATL1_4 | IPR001251 | PS50191 | Cellular retinaldehyde- | CRAL_TRIO | 17.609 | 226 | 401 | ProfileScan |
| | | | binding/triple function, | | | | | |
| | | | C-terminal | | | | | |
| Orysa_PATL1_4 | IPR001251 | SSF52087 | Cellular retinaldehyde- | CRAL_TRIO_C | 5.5E−31 | 225 | 400 | superfamily |
| | | | binding/triple function, | | | | | |
| | | | C-terminal | | | | | |
| Orysa_PATL1_4 | IPR008273 | PF03765 | Cellular retinaldehyde- | CRAL_TRIO_N | 0.00015 | 145 | 215 | HMMPfam |
| | | | binding/triple function, | | | | | |
| | | | N-terminal | | | | | |
| Orysa_PATL1_4 | IPR009038 | PS50866 | GOLD | GOLD | 9.345 | 402 | 509 | ProfileScan |
| Orysa_PATL1_4 | IPR011074 | SSF46938 | Phosphatidylinositol | Sec14p_like_N | 9.1E−10 | 125 | 223 | superfamily |
| | | | transfer protein-like, | | | | | |
| | | | N-terminal | | | | | |

Abreviations of databases in the database accessions:
PF: Pfam;
PS: Prosite;
SM: Smart;
SSF: Superfamily.

[0548] The results of the Pfam scan of the polypeptide sequence as represented by SEQ ID NO: 77 are presented in Table C2.

TABLE C2
Pfam scan results (major accession numbers) of the polypeptide
sequence of Table A2. The amino acid coordinates delimiting the
domain (Domain Name) in the scanned polypeptide (Query
Polypeptide) are given. The e-value of the alignment of the query
Polypeptide to the hit in the Pfam entry is given.

| | | Amino | | |
|---|---|---|---|---|
| | | acid co- | Amino acid | |
| Query | | ordinate: | coordinate: | |
| Polypeptide | Domain Name | Start | End | Evalue |
| Arath_PRP38_1 | PRP38 | 1 | 170 | 2.4e−31 |
| Arath_PRP38_1 | DUF1777 | 255 | 389 | 0.026 |
| Arath_PRP38_4 | DUF1777 | 87 | 221 | 0.026 |
| Arath_PRP38_5 | PRP38 | 1 | 177 | 9.3e−65 |
| Arath_PRP38_5 | DUF1777 | 208 | 355 | 0.15 |
| Brasy_PRP38_1 | PRP38 | 1 | 169 | 1.5e−24 |
| Brasy_PRP38_1 | DUF1777 | 251 | 392 | 0.14 |
| Brasy_PRP38_2 | PRP38 | 1 | 162 | 1E−15 |
| Chlre_PRP38_1 | PRP38 | 1 | 169 | 1.9e−22 |
| Chlre_PRP38_1 | DUF1777 | 289 | 354 | 0.77 |
| Horvu_PRP38_1 | PRP38 | 1 | 169 | 2.1e−29 |
| Lyces_PRP38_1 | PRP38 | 1 | 170 | 3.5e−26 |
| Lyces_PRP38_1 | DUF1777 | 266 | 428 | 0.024 |
| Medtr_PRP38_1 | PRP38 | 1 | 177 | 5E−71 |
| Orysa_PRP38_1 | PRP38 | 1 | 169 | 2.9e−29 |
| Orysa_PRP38_1 | DUF1777 | 270 | 434 | 0.1 |
| Orysa_PRP38_2 | PRP38 | 1 | 177 | 5.5e−75 |
| Orysa_PRP38_2 | DUF1777 | 235 | 392 | 0.071 |
| Ostta_PRP38_1 | PRP38 | 1 | 146 | 6.5e−41 |
| Ostta_PRP38_2 | PRP38 | 16 | 191 | 7.1e−10 |
| Poptr_PRP38_1 | PRP38 | 1 | 169 | 5.8e−29 |
| Poptr_PRP38_1 | DUF1777 | 263 | 414 | 0.0074 |
| Poptr_PRP38_2 | PRP38 | 1 | 169 | 3.7e−26 |
| Poptr_PRP38_2 | DUF1777 | 258 | 414 | 0.23 |
| Sacof_PRP38_1 | PRP38 | 1 | 169 | 8.6e−27 |
| Sacof_PRP38_3 | PRP38 | 1 | 169 | 3.3e−27 |
| Sacof_PRP38_3 | DUF1777 | 263 | 375 | 0.067 |
| Schce_PRP38_1 | PRP38 | 6 | 221 | 2.8e−150 |
| Triae_PRP38_1 | PRP38 | 1 | 177 | 4.6e−71 |
| Triae_PRP38_1 | DUF1777 | 220 | 371 | 0.17 |
| Vitvi_PRP38_1 | PRP38 | 1 | 177 | 4.6e−71 |
| Vitvi_PRP38_1 | DUF1777 | 220 | 371 | 0.17 |

[0549] The results of the InterPro scan of the polypeptide sequence as represented by SEQ ID NO: 129 are presented in Table C3.

TABLE C3
InterPro scan results (major accession numbers) of the polypeptide
sequence as represented by SEQ ID NO: 129.

| | | | Amino acid |
|---|---|---|---|
| | | | coordinates |
| | Accession | | on SEQ |
| Database | number | Accession name | ID NO 129 |
| InterPro | IPR000679 | Zn-finger, GATA type | |
| HMMPfam | PF00320 | GATA | T[178-213] |
| | | | 1.9E−14 |
| HMMSmart | SM00401 | ZnF_GATA | T[172-223] |
| | | | 1.1E−16 |
| ProfileScan | PS50114 | GATA_ZN_FINGER_2 | T[176-208] |
| | | | 12.268 |

[0550] The results of the InterPro scan of the polypeptide sequence as represented by SEQ ID NO: 182 are presented in Table C4.

TABLE C4
InterPro scan results (major accession numbers) of the polypeptide sequence as
represented by SEQ ID NO: 182.
Table C4: Pfam scan results (major accession numbers) of the polypeptide sequence
of Table A4. The amino acid coordinates delimiting the domain (Domain Name) in the
scanned polypeptide (Query Polypeptide) are given. The e-value of the alignment of the
query Polypeptide to the hit in the Pfam entry is given.

| | Zn finger ZZ type | SANT DNA binding | | SWIRM (PFAM)/ |
|---|---|---|---|---|
| | (PFAM)/amino | (SMART)/amino | Ca binding EF hand | amino acid |
| | acid coordinates | acid coordinates | (PROSITE)/amino acid | coordinates |
| INTERPRO Scan | (start-end) | (start-end) | coordinates (start-end) | (start-end) |
| At ADA2a | 47-92 | 107-156 | 287-299 | 461-547 |
| Ol ADA2_1 | 27-72 | 87-136 | | 371-457 |
| Ot ADA2_1 | 26-71 | 86-135 | | |
| Pt ADA2_1 | 55-100 | 115-164 | 271-283 | 454-540 |
| Vv ADA2_1 | 45-90 | 105-154 | 286-298 | 474-560 |
| At ADA2b | 41-86 | 101-150 | 241-253 | 397-483 |
| PtADA2_2 | 44-89 | 104-153 | 304-316 | 474-560 |
| PtADA2_3 | 44-89 | 104-153 | 303-315 | 473-559 |
| Vv ADA2_2 | 1-40 | 55-104 | 241-253 | 397-483 |
| Sl ADA2_2 | 43-88 | 103-152 | | 457-543 |
| Hv ADA2_1 | 45-90 | 105-154 | | |
| Os ADA2_1 | 47-92 | 107-156 | 290-302 | 476-562 |
| Os ADA2_3 | 47-92 | 107-156 | 390-402 | 576-662 |
| Zm ADA2_1 | 47-92 | 107-156 | 293-305 | 474-559 |
| Zm ADA2_2 | 47-92 | 107-156 | 293-305 | 474-559 |
| Sl ADA2_1 | 44-89 | 104-153 | 288-300 | 474-560 |

[0551] The results of the InterPro scan of the polypeptide sequence as represented by SEQ ID NO: 216 are presented in Table C5.

TABLE C5
InterPro scan results of the polypeptide sequence as represented
by SEQ ID NO: 216

| InterPro | | Integrated | Integrated |
|---|---|---|---|
| accession | Integrated | database | database |
| number | database | accession | accession |
| and name | name | number | name |
| IPR0001680 | PFAM | PF00400 | WD40 |
| WD40 repeat | | | |
| IPR0001680 | Smart | SM00320 | WD40 |
| WD40 repeat | | | |
| IPR0001680 | ProfileScan | PS50082 | WD_repeats_2 |
| WD40 repeat | | | |
| IPR0001680 | ProfileScan | PS50294 | WD_REPEATS_REGION |
| WD40 repeat | | | |
| IPR0001680 | FPrintScan | PR00320 | GPROTEINBRPT |
| WD40 repeat | | | |
| IPR011046 | SuperFamily | SSF50978 | WD40_like |
| WD40 | | | |
| repeat-like | | | |
| IPR15943 | Gene3D | G3DSA: | WD40/YVTN repeat-like |
| WD40/YVTN | | 2.130.10.10 | |
| repeat-like | | | |

### Example 5

### Cloning of the Nucleic Acid Sequence Used in the Methods of the Invention

[0552] The nucleic acid sequence used in the methods of the invention was amplified by PCR using as template a custom-made Arabidopsis thaliana seedlings cDNA library (in pCMV Sport 6.0; Invitrogen, Paisley, UK). PCR was performed using Hifi Taq DNA polymerase in standard conditions, using 200 ng of template in a 50 μl PCR mix. Concerning PATL, the primers used were SEQ ID NO: 73: 5′-ggggacaagtttgtacaaaaaagcaggcttaaacaatggcggaggagccac-3′ and SEQ ID

[0553] NO: 74; 5′-ggggaccactttgtacaagaaagctgggtgtggtgaatctggtgatcagg-3′, which include the AttB sites for Gateway recombination. The amplified PCR fragment was purified also using standard methods. The first step of the Gateway procedure, the BP reaction, was then performed, during which the PCR fragment recombines in vivo with the pDONR201 plasmid to produce, according to the Gateway terminology, an “entry clone”, pOrysa_PATL_{—}1. Plasmid pDONR201 was purchased from Invitrogen, as part of the Gateway® technology.

[0554] The entry clone comprising SEQ ID NO: 1 was then used in an LR reaction with two destination vector used for Oryza sativa transformation. A first vector contained as functional elements within the T-DNA borders: a plant selectable marker; a screenable marker expression cassette; and a Gateway cassette intended for LR in vivo recombination with the nucleic acid sequence of interest already cloned in the entry clone. A rice GOS2 promoter (SEQ ID NO: 75) for constitutive expression was located upstream of this Gateway cassette.

[0555] After the LR recombination step, the resulting expression vectors pGOS2::Orysa_PATL_{—}1 (FIG. 4) was transformed into Agrobacterium strain LBA4044 according to methods well known in the art.

[0556] Concerning the PRP38, the primers used were SEQ ID NO: 125: 5′ ggggacaagtttgtacaaaaaagcaggcttaaacaatggcggagatacagtcaaa 3′ and SEQ ID NO: 126; 5′ ggggaccactttgtacaagaaagctgggttcacctccaagaggaacca 3′, which include the AttB sites for Gateway recombination. The amplified PCR fragment was purified also using standard methods. The first step of the Gateway procedure, the BP reaction, was then performed, during which the PCR fragment recombines in vivo with the pDONR201 plasmid to produce, according to the Gateway terminology, an “entry clone”, pPRP38. Plasmid pDONR201 was purchased from Invitrogen, as part of the Gateway® technology.

[0557] The entry clone comprising SEQ ID NO: 76 was then used in an LR reaction with a destination vector used for Oryza sativa transformation. This vector contained as functional elements within the T-DNA borders: a plant selectable marker; a screenable marker expression cassette; and a Gateway cassette intended for LR in vivo recombination with the nucleic acid sequence of interest already cloned in the entry clone. A rice GOS2 promoter (SEQ ID NO: 127) for constitutive expression was located upstream of this Gateway cassette.

[0558] After the LR recombination step, the resulting expression vector pGOS2::PRP38 (FIG. 9) was transformed into Agrobacterium strain LBA4044 according to methods well known in the art.

Concerning GATA, the primers used were prm10133
(SEQ ID NO: 133; sense, start codon in bold):
5′ GGGGACAAGTTTGTACAAAAAAGCAGGCTTAAACAATGTCTACTATC
TACATGAGCCA 3′
and
prm10134 (SEQ ID NO: 134; reverse,complementary):
5′ GGGGACCACTTTGTACAAGAAAGCTGGGTAGCTAGCTAGTTTTGATC
AGC 3′,

which include the AttB sites for Gateway recombination. The amplified PCR fragment was purified also using standard methods. The first step of the Gateway procedure, the BP reaction, was then performed, during which the PCR fragment recombines in vivo with the pDONR201 plasmid to produce, according to the Gateway terminology, an “entry clone”, pGATA-like. Plasmid pDONR201 was purchased from Invitrogen, as part of the Gateway° technology.

[0559] The entry clone comprising SEQ ID NO: 128 was then used in an LR reaction with a destination vector used for Oryza sativa transformation. This vector contained as functional elements within the T-DNA borders: a plant selectable marker; a screenable marker expression cassette; and a Gateway cassette intended for LR in vivo recombination with the nucleic acid sequence of interest already cloned in the entry clone. A rice GOS2 promoter (SEQ ID NO: 135) for root specific expression was located upstream of this Gateway cassette.

[0560] After the LR recombination step, the resulting expression vector pGOS2::GATA-like (FIG. 13) was transformed into Agrobacterium strain LBA4044 according to methods well known in the art.

[0561] The nucleic acid sequence of SEQ ID NO: 177, used in the methods of the invention was amplified by PCR using as template a custom-made Oryza sativa seedlings cDNA library (in pCMV Sport 6.0; Invitrogen, Paisley, UK). PCR was performed using Hifi Taq DNA polymerase in standard conditions, using 200 ng of template in a 50 μl PCR mix. The primers used were prm10106 (SEQ ID NO: 179; sense, start codon in bold): 5′-ggggacaagt ttgtacaaaaaagcaggcttaaacaatgcttcaccattactacagc-3′ and prm10107 (SEQ ID NO: 180; reverse, complementary): 5′-ggggaccactttgtacaagaaagctgggtcca acgctaatgctacact-3′, which include the AttB sites for Gateway recombination. The amplified PCR fragment was purified also using standard methods. The further cloning procedure was as described above.

[0562] Concerning ADA2, the primers used were SEQ ID NO: 211: 5′-GGGGACAAGTTTGTACAAAAAAGCAGGCTTAAACAATGGGTCGTTCGAAACTAGC-3′ and SEQ ID NO: 212; 5′-GGGGACCACTTTGTACAAGAAAGCTGGGTCATGTTAGGACCATGAAGCT ATG-3′, which include the AttB sites for Gateway recombination. The amplified PCR fragment was purified also using standard methods. The first step of the Gateway procedure, the BP reaction, was then performed, during which the PCR fragment recombines in vivo with the pDONR201 plasmid to produce, according to the Gateway terminology, an “entry clone”, pAtADA2_{—}1. Plasmid pDONR201 was purchased from Invitrogen, as part of the Gateway® technology.

[0563] The entry clone comprising SEQ ID NO: 181 was then used in an LR reaction with two destination vector used for Oryza sativa transformation. A first vector contained as functional elements within the T-DNA borders: a plant selectable marker; a screenable marker expression cassette; and a Gateway cassette intended for LR in vivo recombination with the nucleic acid sequence of interest already cloned in the entry clone. A rice HMGP promoter (SEQ ID NO: 213) for constitutive expression was located upstream of this Gateway cassette. On a second vector having same functional elements within the T-DNA borders as described above, a rice EXP9 promoter (SEQ ID NO: 214) was located upstream of the Gateway cassette.

[0564] After the LR recombination step, the resulting expression vectors pHMG::Arath_ADA2_{—}1 (FIG. 18) and pEXP9::Arath_ADA2_{—}1 (FIG. 19) were transformed into Agrobacterium strain LBA4044 according to methods well known in the art.

[0565] Unless otherwise stated, recombinant DNA techniques are performed according to standard protocols described in (Sambrook (2001) Molecular Cloning: a laboratory manual, 3rd Edition Cold Spring Harbor Laboratory Press, CSH, New York) or in Volumes 1 and 2 of Ausubel et al. (1994), Current Protocols in Molecular Biology, Current Protocols. Standard materials and methods for plant molecular work are described in Plant Molecular Biology Labfax (1993) by R.D.D. Croy, published by BIOS Scientific Publications Ltd (UK) and Blackwell Scientific Publications (UK).

[0566] Concerning the WDR23-like polypeptide, the Arabidopsis thaliana cDNA encoding a WDR23-like polypeptide sequence as represented by SEQ ID NO: 216 was amplified by PCR using as template cDNA synthesized from mRNA extracted from different tissues of Arabidopsis thaliana grown under different conditions. The following primers, which include the AttB sites for Gateway recombination, were used for PCR amplification:

(v) Prm 09100 (SEQ ID NO: 274, sense):
5′-GGGGACAAGTTTGTACAAAAAAGCAGGCTTAAACAATGTTTTTTGGA
CCAAGTGAG-3'
(vi) Prm 09101 (SEQ ID NO: 275, reverse,
complementary):
5′-GGGGACCACTTTGTACAAGAAAGCTGGGTTGTGTAGAGAGACGCATC
AGT-3'

[0567] PCR was performed using Hifi Taq DNA polymerase in standard conditions. A PCR fragment of the expected length (including attB sites) was amplified and purified also using standard methods. The first step of the Gateway procedure, the BP reaction, was then performed, during which the PCR fragment recombined in vivo with the pDONR201 plasmid to produce, according to the Gateway terminology, an “entry clone”. Plasmid pDONR201 was purchased from Invitrogen, as part of the Gateway® technology.

### Example 5A

### Topology Prediction of the Polypeptide Sequences Useful in Performing the Methods of the Invention

[0568] TargetP 1.1 predicts the subcellular location of eukaryotic proteins. The location assignment is based on the predicted presence of any of the N-terminal pre-sequences: chloroplast transit peptide (cTP), mitochondrial targeting peptide (mTP) or secretory pathway signal peptide (SP). Scores on which the final prediction is based are not really probabilities, and they do not necessarily add to one. However, the location with the highest score is the most likely according to TargetP, and the relationship between the scores (the reliability class) may be an indication of how certain the prediction is. The reliability class (RC) ranges from 1 to 5, where 1 indicates the strongest prediction. TargetP is maintained at the server of the Technical University of Denmark.

[0569] For the sequences predicted to contain an N-terminal presequence a potential cleavage site can also be predicted.

[0570] A number of parameters were selected, such as organism group (non-plant or plant), cutoff sets (none, predefined set of cutoffs, or user-specified set of cutoffs), and the calculation of prediction of cleavage sites (yes or no).

[0571] The results of TargetP 1.1 analysis of the polypeptide sequence as represented by SEQ ID NO: 129 are presented Table D3. The “plant” organism group has been selected, no cutoffs defined, and the predicted length of the transit peptide requested. The subcellular localization of the polypeptide sequence as represented by SEQ ID NO: 129 may be the cytoplasm or nucleus, no transit peptide is predicted.

TABLE D3
TargetP 1.1 analysis of the polypeptide sequence as represented by
SEQ ID NO: 129

| | |
|---|---|
| Length (AA) | 353 |
| Chloroplastic transit peptide | 0.067 |
| Mitochondrial transit peptide | 0.169 |
| Secretory pathway signal | 0.186 |
| peptide | |
| Other subcellular targeting | 0.804 |
| Predicted Location | / |
| Reliability class | 2 |
| Predicted transit peptide length | / |

[0572] Many other algorithms can be used to perform such analyses, including:
[0573] ChloroP 1.1 hosted on the server of the Technical University of Denmark;
[0574] Protein Prowler Subcellular Localisation Predictor version 1.2 hosted on the server of the Institute for Molecular Bioscience, University of Queensland, Brisbane, Australia;
[0575] PENCE Proteome Analyst PA-GOSUB 2.5 hosted on the server of the University of Alberta, Edmonton, Alberta, Canada;
[0576] TMHMM, hosted on the server of the Technical University of Denmark

### Example 6

### Plant Transformation

### Rice Transformation

[0577] The Agrobacterium containing the expression vector was used to transform Oryza sativa plants. Mature dry seeds of the rice japonica cultivar Nipponbare were dehusked. Sterilization was carried out by incubating for one minute in 70% ethanol, followed by 30 minutes in 0.2% HgCl2, followed by a 6 times 15 minutes wash with sterile distilled water. The sterile seeds were then germinated on a medium containing 2,4-D (callus induction medium). After incubation in the dark for four weeks, embryogenic, scutellum-derived calli were excised and propagated on the same medium. After two weeks, the calli were multiplied or propagated by subculture on the same medium for another 2 weeks. Embryogenic callus pieces were sub-cultured on fresh medium 3 days before co-cultivation (to boost cell division activity).

[0578] Agrobacterium strain LBA4404 containing the expression vector was used for co-cultivation. Agrobacterium was inoculated on AB medium with the appropriate antibiotics and cultured for 3 days at 28° C. The bacteria were then collected and suspended in liquid co-cultivation medium to a density (OD₆₀₀) of about 1. The suspension was then transferred to a Petri dish and the calli immersed in the suspension for 15 minutes. The callus tissues were then blotted dry on a filter paper and transferred to solidified, co-cultivation medium and incubated for 3 days in the dark at 25° C. Co-cultivated calli were grown on 2,4-D-containing medium for 4 weeks in the dark at 28° C. in the presence of a selection agent. During this period, rapidly growing resistant callus islands developed. After transfer of this material to a regeneration medium and incubation in the light, the embryogenic potential was released and shoots developed in the next four to five weeks. Shoots were excised from the calli and incubated for 2 to 3 weeks on an auxin-containing medium from which they were transferred to soil. Hardened shoots were grown under high humidity and short days in a greenhouse.

[0579] Approximately 35 independent T0 rice transformants were generated for one construct. The primary transformants were transferred from a tissue culture chamber to a greenhouse. After a quantitative PCR analysis to verify copy number of the T-DNA insert, only single copy transgenic plants that exhibit tolerance to the selection agent were kept for harvest of T1 seed. Seeds were then harvested three to five months after transplanting. The method yielded single locus transformants at a rate of over 50% (Aldemita and Hodges1996, Chan et al. 1993, Hiei et al. 1994).

### Corn Transformation

[0580] Transformation of maize (Zea mays) is performed with a modification of the method described by Ishida et al. (1996) Nature Biotech 14(6): 745-50. Transformation is genotype-dependent in corn and only specific genotypes are amenable to transformation and regeneration. The inbred line A188 (University of Minnesota) or hybrids with A188 as a parent are good sources of donor material for transformation, but other genotypes can be used successfully as well. Ears are harvested from corn plant approximately 11 days after pollination (DAP) when the length of the immature embryo is about 1 to 1.2 mm. Immature embryos are cocultivated with Agrobacterium tumefaciens containing the expression vector, and transgenic plants are recovered through organogenesis. Excised embryos are grown on callus induction medium, then maize regeneration medium, containing the selection agent (for example imidazolinone but various selection markers can be used). The Petri plates are incubated in the light at 25° C. for 2-3 weeks, or until shoots develop. The green shoots are transferred from each embryo to maize rooting medium and incubated at 25° C. for 2-3 weeks, until roots develop. The rooted shoots are transplanted to soil in the greenhouse. T1 seeds are produced from plants that exhibit tolerance to the selection agent and that contain a single copy of the T-DNA insert.

### Wheat Transformation

[0581] Transformation of wheat is performed with the method described by Ishida et al. (1996) Nature Biotech 14(6): 745-50. The cultivar Bobwhite (available from CIMMYT, Mexico) is commonly used in transformation. Immature embryos are co-cultivated with Agrobacterium tumefaciens containing the expression vector, and transgenic plants are recovered through organogenesis. After incubation with Agrobacterium, the embryos are grown in vitro on callus induction medium, then regeneration medium, containing the selection agent (for example imidazolinone but various selection markers can be used). The Petri plates are incubated in the light at 25° C. for 2-3 weeks, or until shoots develop. The green shoots are transferred from each embryo to rooting medium and incubated at 25° C. for 2-3 weeks, until roots develop. The rooted shoots are transplanted to soil in the greenhouse. T1 seeds are produced from plants that exhibit tolerance to the selection agent and that contain a single copy of the T-DNA insert.

[0582] Soybean Transformation

[0583] Soybean is transformed according to a modification of the method described in the Texas A&M patent U.S. Pat. No. 5,164,310. Several commercial soybean varieties are amenable to transformation by this method. The cultivar Jack (available from the Illinois Seed foundation) is commonly used for transformation. Soybean seeds are sterilised for in vitro sowing. The hypocotyl, the radicle and one cotyledon are excised from seven-day old young seedlings. The epicotyl and the remaining cotyledon are further grown to develop axillary nodes. These axillary nodes are excised and incubated with Agrobacterium tumefaciens containing the expression vector. After the cocultivation treatment, the explants are washed and transferred to selection media. Regenerated shoots are excised and placed on a shoot elongation medium. Shoots no longer than 1 cm are placed on rooting medium until roots develop. The rooted shoots are transplanted to soil in the greenhouse. T1 seeds are produced from plants that exhibit tolerance to the selection agent and that contain a single copy of the T-DNA insert.

### Rapeseed/Canola Transformation

[0584] Cotyledonary petioles and hypocotyls of 5-6 day old young seedling are used as explants for tissue culture and transformed according to Babic et al. (1998, Plant Cell Rep 17: 183-188). he commercial cultivar Westar (Agriculture Canada) is the standard variety used for transformation, but other varieties can also be used. Canola seeds are surface-sterilized for in vitro sowing. The cotyledon petiole explants with the cotyledon attached are excised from the in vitro seedlings, and inoculated with Agrobacterium (containing the expression vector) by dipping the cut end of the petiole explant into the bacterial suspension. The explants are then cultured for 2 days on MSBAP-3 medium containing 3 mg/l BAP, 3% sucrose, 0.7% Phytagar at 23° C., 16 hr light. After two days of co-cultivation with Agrobacterium, the petiole explants are transferred to MSBAP-3 medium containing 3 mg/l BAP, cefotaxime, carbenicillin, or timentin (300 mg/l) for 7 days, and then cultured on MSBAP-3 medium with cefotaxime, carbenicillin, or timentin and selection agent until shoot regeneration. When the shoots are 5-10 mm in length, they are cut and transferred to shoot elongation medium (MSBAP-0.5, containing 0.5 mg/l BAP). Shoots of about 2 cm in length are transferred to the rooting medium (MSO) for root induction. The rooted shoots are transplanted to soil in the greenhouse. T1 seeds are produced from plants that exhibit tolerance to the selection agent and that contain a single copy of the T-DNA insert.

### Alfalfa Transformation

[0585] A regenerating clone of alfalfa (Medicago sativa) is transformed using the method of (McKersie et al., 1999 Plant Physiol 119: 839-847). Regeneration and transformation of alfalfa is genotype dependent and therefore a regenerating plant is required. Methods to obtain regenerating plants have been described. For example, these can be selected from the cultivar Rangelander (Agriculture Canada) or any other commercial alfalfa variety as described by Brown DCW and A Atanassov (1985. Plant Cell Tissue Organ Culture 4: 111-112). Alternatively, the RA3 variety (University of Wisconsin) has been selected for use in tissue culture (Walker et al., 1978 μm J Bot 65:654-659). Petiole explants are cocultivated with an overnight culture of Agrobacterium tumefaciens C58C1 pMP90 (McKersie et al., 1999 Plant Physiol 119: 839-847) or LBA4404 containing the expression vector. The explants are cocultivated for 3 d in the dark on SH induction medium containing 288 mg/L Pro, 53 mg/L thioproline, 4.35 g/L K2SO4, and 100 μm acetosyringinone. The explants are washed in half-strength Murashige-Skoog medium (Murashige and Skoog, 1962) and plated on the same SH induction medium without acetosyringinone but with a suitable selection agent and suitable antibiotic to inhibit Agrobacterium growth. After several weeks, somatic embryos are transferred to BOi2Y development medium containing no growth regulators, no antibiotics, and 50 g/L sucrose. Somatic embryos are subsequently germinated on half-strength Murashige-Skoog medium. Rooted seedlings were transplanted into pots and grown in a greenhouse. T1 seeds are produced from plants that exhibit tolerance to the selection agent and that contain a single copy of the T-DNA insert.

### Cotton Transformation

[0586] Cotton is transformed using Agrobacterium tumefaciens according to the method described in U.S. Pat. No. 5,159,135. Cotton seeds are surface sterilised in 3% sodium hypochlorite solution during 20 minutes and washed in distilled water with 500 μg/ml cefotaxime. The seeds are then transferred to SH-medium with 50 μg/ml benomyl for germination. Hypocotyls of 4 to 6 days old seedlings are removed, cut into 0.5 cm pieces and are placed on 0.8% agar. An Agrobacterium suspension (approx. 108 cells per ml, diluted from an overnight culture transformed with the gene of interest and suitable selection markers) is used for inoculation of the hypocotyl explants. After 3 days at room temperature and lighting, the tissues are transferred to a solid medium (1.6 g/l Gelrite) with Murashige and Skoog salts with B5 vitamins (Gamborg et al., Exp. Cell Res. 50:151-158 (1968)), 0.1 mg/l 2,4-D, 0.1 mg/l 6-furfurylaminopurine and 750 μg/ml MgCL2, and with 50 to 100 μg/ml cefotaxime and 400-500 μg/ml carbenicillin to kill residual bacteria. Individual cell lines are isolated after two to three months (with subcultures every four to six weeks) and are further cultivated on selective medium for tissue amplification (30° C., 16 hr photoperiod). Transformed tissues are subsequently further cultivated on non-selective medium during 2 to 3 months to give rise to somatic embryos. Healthy looking embryos of at least 4 mm length are transferred to tubes with SH medium in fine vermiculite, supplemented with 0.1 mg/l indole acetic acid, 6 furfurylaminopurine and gibberellic acid. The embryos are cultivated at 30° C. with a photoperiod of 16 hrs, and plantlets at the 2 to 3 leaf stage are transferred to pots with vermiculite and nutrients. The plants are hardened and subsequently moved to the greenhouse for further cultivation.

[0587] Concerning WDR23-like genes, Cotton (Gossypium hirsutum L.) transformation is performed using Agrobacterium tumefaciens, on hypocotyls explants. The commercial cultivars such as Coker 130 or Coker 312 (SeedCo, Lubbock, Tex.) are standard varieties used for transformation, but other varieties can also be used. The seeds are surface sterilized and germinated in the dark. Hypocotyl explants are cut from the germinated seedlings to lengths of about 1-1.5 centimeter. The hypotocyl explant is submersed in the Agrobacterium tumefaciens inoculum containing the expression vector, for 5 minutes then co-cultivated for about 48 hours on MS+1.8 mg/l KNO3+2% glucose at 24° C., in the dark. The explants are transferred the same medium containing appropriate bacterial and plant selectable markers (renewed several times), until embryogenic calli is seen. The calli are separated and subcultured until somatic embryos appear. Plantlets derived from the somatic embryos are matured on rooting medium until roots develop. The rooted shoots are transplanted to potting soil in the greenhouse. T1 seeds are produced from plants that exhibit tolerance to the selection agent and that contain a single copy of the T-DNA insert.

### Example 6B

### Expression Vector Construction Using the Nucleic Acid Sequence as Represented by SEQ ID NO: 215

[0588] The entry clone comprising SEQ ID NO: 215 was subsequently used in an LR reaction with a destination vector used for Oryza sativa transformation. This vector contained as functional elements within the T-DNA borders: a plant selectable marker; a screenable marker expression cassette; and a Gateway cassette intended for LR in vivo recombination with the nucleic acid sequence of interest already cloned in the entry clone. A rice GOS2 promoter (SEQ ID NO: 272) for constitutive expression was located upstream of this Gateway cassette. A second destination vector for Oryza sativa transformation was also produced, with a rice metallothionein promoter (MT; SEQ ID NO: 273) for meristem-specific expression.

[0589] After the LR recombination step, the resulting expression vector pGOS2::WDR23-like and pMT::WDR23-like (FIG. 25) were independently transformed into Agrobacterium strain LBA4044 according to methods well known in the art.

### Example 7

### Phenotypic Evaluation Procedure

[0590] 7.1 Evaluation Setup

[0591] Approximately 35 independent T0 rice transformants were generated. The primary transformants were transferred from a tissue culture chamber to a greenhouse for growing and harvest of T1 seed. Six events, of which the T1 progeny segregated 3:1 for presence/absence of the transgene, were retained. For each of these events, approximately 10 T1 seedlings containing the transgene (hetero- and homo-zygotes) and approximately 10 T1 seedlings lacking the transgene (nullizygotes) were selected by monitoring visual marker expression. The transgenic plants and the corresponding nullizygotes were grown side-by-side at random positions. Greenhouse conditions (non-stress conditions) were of shorts days (12 hours light), 28° C. in the light and 22° C. in the dark, and a relative humidity of 70%. Frequent watering was applied to satisfy plant water and nutrient needs in order to grow and develop with a healthy appearance.

[0592] From the stage of sowing until the stage of maturity the plants were passed several times through a digital imaging cabinet. At each time point digital images (2048×1536 pixels, 16 million colours) were taken of each plant from at least 6 different angles.

### Drought Screen

[0593] Plants from T2 seeds are grown in potting soil under normal conditions until they approached the heading stage. They were then transferred to a “dry” section where irrigation was withheld. Humidity probes were inserted in randomly chosen pots to monitor the soil water content (SWC). When SWC went below certain thresholds, the plants were automatically re-watered continuously until a normal level was reached again. The plants were then re-transferred again to normal conditions. The rest of the cultivation (plant maturation, seed harvest) was the same as for plants not grown under abiotic stress conditions. Growth and yield parameters are recorded as detailed for growth under normal conditions.

### Nitrogen Use Efficiency Screen

[0594] Rice plants from T2 seeds are grown in potting soil under normal conditions except for the nutrient solution. The pots were watered from transplantation to maturation with a specific nutrient solution containing reduced N nitrogen (N) content, usually between 7 to 8 times less. The rest of the cultivation (plant maturation, seed harvest) was the same as for plants not grown under abiotic stress. Growth and yield parameters are recorded as detailed for growth under normal conditions.

[0595] 7.2 Statistical Analysis: F Test

[0596] A two factor ANOVA (analysis of variants) was used as a statistical model for the overall evaluation of plant phenotypic characteristics. An F test was carried out on all the parameters measured of all the plants of all the events transformed with the gene of the present invention. The F test was carried out to check for an effect of the gene over all the transformation events and to verify for an overall effect of the gene, also known as a global gene effect. The threshold for significance for a true global gene effect was set at a 5% probability level for the F test. A significant F test value points to a gene effect, meaning that it is not only the mere presence or position of the gene that is causing the differences in phenotype.

[0597] Because two experiments with overlapping events were carried out, a combined analysis was performed. This is useful to check consistency of the effects over the two experiments, and if this is the case, to accumulate evidence from both experiments in order to increase confidence in the conclusion. The method used was a mixed-model approach that takes into account the multilevel structure of the data (i.e. experiment-event-segregants). P values were obtained by comparing likelihood ratio test to chi square distributions.

[0598] 7.3 Parameters Measured

### Biomass-Related Parameter Measurement

[0599] From the stage of sowing until the stage of maturity the plants were passed several times through a digital imaging cabinet. At each time point digital images (2048×1536 pixels, 16 million colours) were taken of each plant from at least 6 different angles.

[0600] The plant aboveground area (or leafy biomass) was determined by counting the total number of pixels on the digital images from aboveground plant parts discriminated from the background. This value was averaged for the pictures taken on the same time point from the different angles and was converted to a physical surface value expressed in square mm by calibration. Experiments show that the aboveground plant area measured this way correlates with the biomass of plant parts above ground. The above ground area is the area measured at the time point at which the plant had reached its maximal leafy biomass. The early vigour is the plant (seedling) aboveground area three weeks post-germination. Increase in root biomass is expressed as an increase in total root biomass (measured as maximum biomass of roots observed during the lifespan of a plant); or as an increase in the root/shoot index (measured as the ratio between root mass and shoot mass in the period of active growth of root and shoot).

[0601] Early vigour was determined by counting the total number of pixels from aboveground plant parts discriminated from the background. This value was averaged for the pictures taken on the same time point from different angles and was converted to a physical surface value expressed in square mm by calibration. The results described below are for plants three weeks post-germination.

### Seed-Related Parameter Measurements

[0602] The mature primary panicles were harvested, counted, bagged, barcode-labelled and then dried for three days in an oven at 37° C. The panicles were then threshed and all the seeds were collected and counted. The filled husks were separated from the empty ones using an air-blowing device. The empty husks were discarded and the remaining fraction was counted again. The filled husks were weighed on an analytical balance. The number of filled seeds was determined by counting the number of filled husks that remained after the separation step. The total seed yield was measured by weighing all filled husks harvested from a plant. Total seed number per plant was measured by counting the number of husks harvested from a plant. Thousand Kernel Weight (TKW) is extrapolated from the number of filled seeds counted and their total weight. The Harvest Index (HI) in the present invention is defined as the ratio between the total seed yield and the above ground area (mm²), multiplied by a factor 10⁶. The total number of flowers per panicle as defined in the present invention is the ratio between the total number of seeds and the number of mature primary panicles. The seed fill rate as defined in the present invention is the proportion (expressed as a %) of the number of filled seeds over the total number of seeds (or florets).

### Salt Stress Screen

[0603] Plants are grown on a substrate made of coco fibers and argex (3 to 1 ratio). A normal nutrient solution is used during the first two weeks after transplanting the plantlets in the greenhouse. After the first two weeks, 25 mM of salt (NaCl) is added to the nutrient solution, until the plants were harvested. Growth and yield parameters are recorded as detailed for growth under normal conditions.

### Reduced Nutrient (Nitrogen) Availability Screen

[0604] Plants from six events (T2 seeds) are grown in potting soil under normal conditions except for the nutrient solution. The pots are watered from transplantation to maturation with a specific nutrient solution containing reduced N nitrogen (N) content, usually between 7 to 8 times less. The rest of the cultivation (plant maturation, seed harvest) is the same as for plants not grown under abiotic stress. Growth and yield parameters are recorded as detailed for growth under normal conditions.

### Example 8

### Results of the Phenotypic Evaluation of the Transgenic Plants

[0605] The results of the evaluation of transgenic rice plants expressing Orysa_PATL_{—}1 (SEQ ID NO:1) nucleic acid from the GOS2 promoter and grown in a green house under non-stress conditions (Example 7) are presented below. An increase of at least 3% was observed for the seed weight (total seed weight), number of filled seeds, and plant height (Table D1).

TABLE D1
Result of evaluation of performance of transgenic plants
(T2 plants) transformed with pGOS2::SEQ ID NO: 1.

| | % increase in the transgenic |
|---|---|
| | plant (plants transformed with |
| Yield- | pGOS2::Orysa_PATL_1) |
| related | compared to the control |
| trait | nullizygous plant |
| Total Seed Weight | 8 |
| Harvest Index | 5 |
| Plant Height | 3 |
| Number of Filled | 7 |
| Seeds | |

[0606] The results of the evaluation of transgenic rice plants expressing a AtPRP38_{—}1 (SEQ ID NO:76) nucleic acid grown in a green house under non-stress conditions (Example 7) are presented below. An increase of at least 5% was observed for aboveground biomass (AreaMax), emergence vigour (early vigour), total seed yield, number of filled seeds, fill rate, harvest index, and number of seeds per plant (Table D2).

TABLE D2
Result of evaluation of performance of transgenic plants
transformed with pGOS2::PRP38.

| Yield- | % increase in the transgenic |
|---|---|
| related | plant compared to the |
| trait | control nullizygous plant |
| Above ground area | 10 |
| Emergence Vigour | 38 |
| Total seed weight | 18 |
| Number of filled seeds | 18 |
| Seed filling rate | 7 |
| Harvest Index | 8 |
| Total number of seeds | 11 |

[0607] Evaluation of transgenic rice plants expressing the GA TA-like nucleic acid represented by SEQ ID NO: 128 under non-stress conditions revealed an increase of Thousand Kernel Weight (all six events, overall increase of 9.1%, p-value: 0.00001). No significant changes were observed for other yield parameters.

[0608] Evaluation of transgenic rice plants expressing the GATA-like nucleic acid represented by SEQ ID NO: 177 under non-stress conditions revealed an increase of total weight of seeds (four lines out of six, overall increase of 16.9%, p-value: 0.00001) and number of filled seeds (four lines out of six, overall increase of 16.0%, p-value: 0.00001). No significant changes were observed for other yield parameters.

[0609] The results of the evaluation of transgenic rice plants expressing Arath_ADA2_{—}1 (SEQ ID NO: 181) nucleic acid from either the pHMG or the pEXP promoters and grown in a green house under non-stress conditions (Example 7) are presented below. An increase of at least 3% was observed for the seed weight (total seed weight), number of filled seeds, seed filling (fill rate), number of flowers per planicle and harvest index (Table D4).

TABLE D4
Result of evaluation of performance of transgenic plants
(T1 plants) transformed with pHMG::SEQ ID NO: 181 and
with pEXP::SEQ ID NO: 181.

| | % increase in the | % increase in the |
|---|---|---|
| | transgenic plant | transgenic plant |
| | compared to the | compared to the |
| | control nullizygous | control nullizygous |
| Yield- | plant (plants | plant (plants |
| related | transformed with | transformed with |
| trait | pHMG::Arath_ADA2_1) | pEXP::Arath_ADA2_1) |
| Total seed weight | 21 | 9 |
| Number of filled | 21 | 8 |
| seeds | | |
| Seed filling rate | 12 | 10 |
| Nr flowers per | 4 | 3 |
| panicle | | |
| Harvest Index | 23 | 8 |

### Example 9

### Results of the Phenotypic Evaluation of the Transgenic Rice Plants Expressing the Nucleic Acid Sequence Encoding a WDR23-Like Polypeptide as Represented by SEQ ID NO: 216, Under the Control of a Constitutive Promoter

[0610] The results of the evaluation of T1 and T2 generation transgenic rice plants expressing the nucleic acid sequence encoding a WDR23-like polypeptide as represented by SEQ ID NO: 216, under the control of a GOS2 promoter for constitutive expression, are presented below.

[0611] There was a significant increase in the total seed yield per plant, in the seed filling rate, in the number of filled seeds, in the harvest index, and in the Thousand Kernel Weight (TKW) of the transgenic plants compared to corresponding nullizygotes (controls), as shown in Table D5, in both T1 and T2 generation phenotypic analysis.

TABLE D5
Results of the evaluation of T1 and T2 generation transgenic rice
plants expressing the nucleic acid sequence encoding a WDR23-like
polypeptide as represented by SEQ ID NO: 216, under the control
of a GOS2 promoter for constitutive expression.

| | Overall average % in | Overall average % in |
|---|---|---|
| Trait | T1 generation | T2 generation |
| Total seed yield per plant | 84 | 16 |
| Seed filling rate | 73 | 11 |
| Number of filled seeds | 95 | 7 |
| Harvest index | 93 | 13 |
| TKW | 8 | 4 |

### Example 10

### Results of the Phenotypic Evaluation of the Transgenic Rice Plants Expressing the Nucleic Acid Sequence Encoding a WDR23-Like Polypeptide as Represented by SEQ ID NO: 216, Under the Control of a Meristem-Specific Promoter

[0612] The results of the evaluation of T1 and T2 generation transgenic rice plants expressing the nucleic acid sequence encoding a WDR23-like polypeptide as represented by SEQ ID NO: 216, under the control of a metallothionein MT promoter for meristem-specific expression, are presented below.

[0613] There was a significant increase in the total seed yield per plant, in the seed filling rate, in the number of filled seeds, in the harvest index, and in the Thousand Kernel Weight (TKW) of the transgenic plants compared to corresponding nullizygotes (controls), as shown in Table E, in both T1 and T2 generation phenotypic analysis.

TABLE E
Results of the evaluation of T1 and T2 generation transgenic rice
plants expressing the nucleic acid sequence encoding a WDR23-like
polypeptide as represented by SEQ ID NO: 216, under the control
of an MT promoter for meristem-specific expression.

| | Overall average % in | Overall average % in |
|---|---|---|
| Trait | T1 generation | T2 generation |
| Total seed yield per plant | 18 | 7 |
| Seed filling rate | 17 | 6 |
| Number of filled seeds | 10 | 5 |
| Harvest index | 15 | 8 |
| TKW | 2 | 0 |

The application's sequence listing, which the Patent Office published only in electronic form, follows.

SEQUENCE LISTING (275 sequences)

SEQ ID NO: 1 - DNA, 1842 bp, Oryza sativa
atggcggaggagccacagccagaggccgcgcccgccgcggtggcggcgacgaccgaggtggcggtggcggagaaggcgcccgtggaggcggagaaggagaagaaggtggaggaggagacgccggcggtggaggccgaggcgaaggaggagaagaaggatgaggcggcggcggcggcggcggcgggaggtgatgaggccggggcgatagaggggaccggatcgttcaaggaggagagcaacctggtggcggacttgcctgacccggagaagaaggcgctcgatgagttcaagcagctgatcgccgccgccctcgccgcctgtgagttcaatctgcctccccctccgccgcctcccaaggcgaaggttgaagccgccgttgaggagaccaaggcggaggagaccaaggccgaggaggaacccaaggctgaggagccggccaaggaggaggagcccaaggccgaggtggcggcggcggcggcggcgccgccggaggcaggaaccgaggagccgaaggcggaggcgtcgtccgaagaggccaagaccgaggagccgaaggccgaggcggcggccgacgagccggccaaggaggagtccaaagctgaggcggcgccggctgaggaagccaagccggccgagccggagccggaggagaagaccgtcgtggtcaccgaggaagaggcggccaccaagacggtggaagcgatcgaggaaaccgtcgtgcccgctgctgctgcgcctgctgccgccgccacggaggaagccgcggcgccggaaccggaggtgcaggcggcggcggcgcctgagcccgtgttgatctggggcgtgcccctggtaggcgacgacgagcgcaccgacacggtgctcctcaagttcctgcgcgcgcgcgagttcaaggtgaaggaggccatggcgatgctcaggtcggccgtgctgtggcgcaagcgcttcggcatcgagtccctcctcgacgccgacctcgccctgccggagctcgacagcgtggtgttctaccgcggcgccgaccgcgagggccaccccgtgtgctacaacgtctacggcgaattccaggacaaggacctgtacgagaaggcattcggcgacgaggagaagcgggagcgcttcctcaagtggcgcatccagctgctggagcgcggcatcctgtcgcagctcgacttctcgcccagtggcatctgctccatggttcaggtcacagacctcaagaactcgccacctatgctcggcaagcaccgcgccgtcacccgccaggccgttgctctgctccaggacaactaccccgagttcatcgccaagaaggtgttcatcaatgtgccatggtggtatctcgctgccaacaaaatgatgagcccgttcctcacgcagcgtaccaagagcaagttcatttttgccagcccagccaaatcagctgagaccctcttcagatatatcgcaccagagcaagtccctgtccaattcggaggtctcttcaaggaagatgatcctgagttcaccacctcagacgccgttaccgagctcactatcaaaccttcatcgaaagaaaccgttgagattcctgtcactgagaattccacgattggatgggagctccgggtgcttggatgggaggtgagctacggagcagagttcactcctgatgccgagggtggatacacagtcatcgtgcagaaaacgaggaaggtgcctgcaaatgaggaaccaatcatgaaaggcagcttcaaggttggcgagccaggaaagattgtgctaacgatcaacaaccctgcatcaaagaagaagaagctcctctacagatccaaggtcaagagcaccagtgagtccgtttga

SEQ ID NO: 2 - protein, 613 aa, Oryza sativa
MAEEPQPEAAPAAVAATTEVAVAEKAPVEAEKEKKVEEETPAVEAEAKEEKKDEAAAAAAAGGDEAGAIEGTGSFKEESNLVADLPDPEKKALDEFKQLIAAALAACEFNLPPPPPPPKAKVEAAVEETKAEETKAEEEPKAEEPAKEEEPKAEVAAAAAAPPEAGTEEPKAEASSEEAKTEEPKAEAAADEPAKEESKAEAAPAEEAKPAEPEPEEKTVVVTEEEAATKTVEAIEETVVPAAAAPAAAATEEAAAPEPEVQAAAAPEPVLIWGVPLVGDDERTDTVLLKFLRAREFKVKEAMAMLRSAVLWRKRFGIESLLDADLALPELDSVVFYRGADREGHPVCYNVYGEFQDKDLYEKAFGDEEKRERFLKWRIQLLERGILSQLDFSPSGICSMVQVTDLKNSPPMLGKHRAVTRQAVALLQDNYPEFIAKKVFINVPWWYLAANKMMSPFLTQRTKSKFIFASPAKSAETLFRYIAPEQVPVQFGGLFKEDDPEFTTSDAVTELTIKPSSKETVEIPVTENSTIGWELRVLGWEVSYGAEFTPDAEGGYTVIVQKTRKVPANEEPIMKGSFKVGEPGKIVLTINNPASKKKKLLYRSKVKSTSESV

SEQ ID NO: 3 - DNA, 1308 bp, Oryza sativa
atgtctccgaccgccaccccatcccccgcgcccgccgcggtggcggcagcgcccaagccgccgccgtcggggacgggggcgaagcgcagcctgatgtcgtcgctgatggaggccaccgcgctgctcaggtcgtcgtcgttcaaggaggactcgtacgtggcgtccgcgctcccggcgtccgacctccgcgcgctcgccgacctcagggcgctgctgtccacgcacccggacccaatctccatctggggcgtgccgctcaacccggcgccgccccagggcggggagggggccccggccccggccgccgccgccgacgagcgcgccgacgtcgtgctgctcaagttcctccgcgcgcgggacttccgcgtccgcgacgcgcacgccatgctgctccgctgcgccgcgtggcgggccgagttccgcgccgacgccgtgctggacgaggacctcgggttcaaggacctggagggggtcgtcgcctacatgcacggctgggaccgggagggccacccggtctgctacaacgcctacggcgtcttcaaggacagggacatgtacgaccgcgtcttcggcgacggcgagcgcctcgcccgcttcctccgctggcgcgtccaggtcatggagcgcggcgtccgcgcgctccacctccgccccggcggcgtcaacgccatcatccaggtcaccgacctcaaggacatgcccaagcgcgagctccgcgccgcgtccaaccagatcctctccctcttccaggacaactaccctgagatggtcgcgcgcaaggtgttcatcaacgtgccctggtacttctcggtgctgttctccatgatctcgccgttcctcacggagcgcaccaagagcaagttcgtcatcgcgcgcgagggcaacgtcgccgagacgctcttcaagttcatccggccggagctggtgccggtgcagtacggcgggctgagccgcgccggcgacctggagaacggcccgccgaagccggcgtccgagttcaccatcaagggcggcgagaaggtcttcctagagatcgacggcatcgaggccggcgcgacgataacgtgggacctggtggtgggcgggtgggagctggagtacggcgcggagtacgtgccggcggcggaggacagctacacgctgtgcgtggagcggacgaggaaggtgccggccgccgccgacgagccggtgcacaacgccttcacggcgagggaggccggcaagatggtgctctccatcgacaactccggctcccggaagcggaaggtcgccgcctaccggtacttcgtgcgcaagccgtcggcgtag

SEQ ID NO: 4 - protein, 435 aa, Oryza sativa
MSPTATPSPAPAAVAAAPKPPPSGTGAKRSLMSSLMEATALLRSSSFKEDSYVASALPASDLRALADLRALLSTHPDPISIWGVPLNPAPPQGGEGAPAPAAAADERADVVLLKFLRARDFRVRDAHAMLLRCAAWRAEFRADAVLDEDLGFKDLEGVVAYMHGWDREGHPVCYNAYGVFKDRDMYDRVFGDGERLARFLRWRVQVMERGVRALHLRPGGVNAIIQVTDLKDMPKRELRAASNQILSLFQDNYPEMVARKVFINVPWYFSVLFSMISPFLTERTKSKFVIAREGNVAETLFKFIRPELVPVQYGGLSRAGDLENGPPKPASEFTIKGGEKVFLEIDGIEAGATITWDLVVGGWELEYGAEYVPAAEDSYTLCVERTRKVPAAADEPVHNAFTAREAGKMVLSIDNSGSRKRKVAAYRYFVRKPSA

SEQ ID NO: 5 - DNA, 1758 bp, Oryza sativa
atggctgaggaggcgaagcaagagacccccgccgccgccgaggtggtggtggtggagaaggccgacgaggtggtggcggtggagaaggccgtggaggtggaggcggaggagaagaagttggcggagcaggaggaggaggaggagaagaaggcggaggaggcggaggaggccgctgggggcgatgaggcggcggtgatcgaggggacggggtcgttcaaggaggagagcaacctcgtctccgagctccccgacccggagcgcacggcgctcgcccagctcaaggagctcgtcgccgccgcgcttgccgccggcgagtttgaccttcccccgccgccgccgcctccaccggccaaggcggaggagccggccaaggaggaggaacccaaggccgccgaggcccccgccgccgaggagcccaaggccgaggccgaggctgaggctgaggccgccgccacggaggagcccaagaccgaggagcccaagaccgaggagcccgccaaggaggaggagcccaaggcggcggcggcggctgcggccgaggagcccaaggcggaggcggcggcggaggaggccaagccggccgagccggaaacggaggagaagaccgtcgtggtcaccgaggatgaaggcaccagcaagacggtggaggccatcgaggagaccgtcgtcgtcgccgccccggccgcggccgcggaagccgaggctgcggcgccgaaggaggagctgatatggggcgtgccgctgaccggcgacgacgagcgcacggacaccgtgctgctcaagttcctccgcgccagggagttcaaggtgaaggaggccatggcgatgctcaaggcggcggtgctgtggcgcaagcgcttcggcatcgacgccgtcctggccgccgacctcggcctgccggagctcgagaacgtggtgttctaccgcggcgccgaccgcgagggccaccccgtctgctacaacgtctacggcgagttccaggacaaggacctctacgagaaggccttcggcgacgaggagaagcgggagcgattcctcaagtggcgcatccagctcctcgagcgcggcatcctcgaccagctcgacttctcccccagcggcatctgctccatggtgcaggtcaccgacctcaagaactcgccgcccatgctcggcaagcaccgcaccgtcacccgccaggcgctcgccctgctccaggacaactaccccgagttcatcgccaagaagattttcatcaacgtgccatggtggtacattgcggctaacaaaatggtgagtccgttcctcacacaacgcaccaagagcaagatcatcttttgcaccgcagccaagtctgcagagacccttttcagatacattgctcctgagcaagtccctgtccaattcggaggcctctacaaagaggatgacaccgagttctccacctcagatgctgtcacagagcttccgatcaaaccttcatccaaagaaactgttgagattcctgctactgagaactccacggttgtgtgggagcttcgggtgcttgggtgggaggtgagctacggtgcagagttcacccctgatgcagagggtggctacactgtcattgtgcagaagacaaggaaggtgcccgccaatgaagagccgatcatgaagggcagcttcaaggttggcgagcctggcaagatcgtcctcacagtcgacaacgcagcatccaagaagaagaagcagcttctttaccgattcaaggtcaagagctcctctgaatctgcctaa

SEQ ID NO: 6 - protein, 585 aa, Oryza sativa
MAEEAKQETPAAAEVVVVEKADEVVAVEKAVEVEAEEKKLAEQEEEEEKKAEEAEEAAGGDEAAVIEGTGSFKEESNLVSELPDPERTALAQLKELVAAALAAGEFDLPPPPPPPPAKAEEPAKEEEPKAAEAPAAEEPKAEAEAEAEAAATEEPKTEEPKTEEPAKEEEPKAAAAAAAEEPKAEAAAEEAKPAEPETEEKTVVVTEDEGTSKTVEAIEETVVVAAPAAAAEAEAAAPKEELIWGVPLTGDDERTDTVLLKFLRAREFKVKEAMAMLKAAVLWRKRFGIDAVLAADLGLPELENVVFYRGADREGHPVCYNVYGEFQDKDLYEKAFGDEEKRERFLKWRIQLLERGILDQLDFSPSGICSMVQVTDLKNSPPMLGKHRTVTRQALALLQDNYPEFIAKKIFINVPWWYIAANKMVSPFLTQRTKSKIIFCTAAKSAETLFRYIAPEQVPVQFGGLYKEDDTEFSTSDAVTELPIKPSSKETVEIPATENSTVVWELRVLGWEVSYGAEFTPDAEGGYTVIVQKTRKVPANEEPIMKGSFKVGEPGKIVLTVDNAASKKKKQLLYRFKVKSSSESA

SEQ ID NO: 7 - DNA, 1554 bp, Oryza sativa
atggcggtggaggtcgtgtctgagggtgcggcggccgccgcggcggaggtggcggcgccggagacgaaggaggtgaccgcgaaggcggcggcggatgaggcggtgacgctggctgccgtcgtgtccaagaacgcgtcgttcagggaggagagcaacttcctggatgatctcaaggacggcgagaggaaggcgttggctgagctccgtgccaaggttgaggaggccatcgtcgacggcaagctgttcgatgacggcaaggtggaggccaagaagaaggccgcggcggcggaggaggagaaggcggtggaggaggccgccggtgagaagaaagatggcgaggagaagaaagaggaggaggagccggtgacggaggagaagaaggaagaggagcaaggcgaggaggaggaggagcccaagaaagaggaagccgacgagggcgagaaggaggagaagccggcggaggaggaggcggcggcggttgtggacaaggacatcgctctgtggggcgtgccgctgctgccgagcaagggcgacgacgccaccgacgtcgtcctcctcaagttcctccgcgcgcgcgacttcaaggccggcgccgccttcgacatgctccgcaagacgctccactggcgcagggagtggaagggcttcgccgccggcaccgacgacgacgacgacggcgaggcgctcccggcggagctcgccgacgcgtgctacctcgacggcgcggacagggagggccacccggtgtgctacaacgcgctcggcgtgttcgccgacgacgccgtgtacaagaaggcgctcggcacggaggaaggcaaggcgaggttcctccggtggagggtgcgcgccatggagagccacgtggccaagctcgacctcaggcccggcggcgtcgcgtcgctgctgcaggtgacggacctcaagaactcgccggggccggccaagaaggacctccgcgtcgccatgaagcaggtgctcgacctcttccaggacaactaccctgagctcgtcgcaagaaacattctgatcaatgtgccgttctggtactacgcgttcagcaccctcttctacccgttcatgacgcagaggaccaagagcaagttcgtcattgctcggccctccaaggtcaccgagaccctcctcaagtacattcccattgaagccattccagtgaagtacggtggtctgaagcgcgacgacgacaccgagttctcggcagaggacagtgaagtcacagagctcgttgtcaaggcaagctccaccgaaaccatcgagatcgaagccacagagggtgacactacgctgacatgggacctgaccgtgctgggatgggaggtgaactacaaggaggagttcgtgccgagcgaggagggctcgtacaccgtcatcgtcaagaaggggaagaagatggggtcgtcggaggcggcggtccgcaactcgttccgcgccggcgagccggggaaggtggtcctcaccgtcgagaacctgacgcacaggaagaagaaggtgctgttcaggcacaaggccaagagcgcctgtgccaaggagtgctga

SEQ ID NO: 8 - protein, 517 aa, Oryza sativa
MAVEVVSEGAAAAAAEVAAPETKEVTAKAAADEAVTLAAVVSKNASFREESNFLDDLKDGERKALAELRAKVEEAIVDGKLFDDGKVEAKKKAAAAEEEKAVEEAAGEKKDGEEKKEEEEPVTEEKKEEEQGEEEEEPKKEEADEGEKEEKPAEEEAAAVVDKDIALWGVPLLPSKGDDATDVVLLKFLRARDFKAGAAFDMLRKTLHWRREWKGFAAGTDDDDDGEALPAELADACYLDGADREGHPVCYNALGVFADDAVYKKALGTEEGKARFLRWRVRAMESHVAKLDLRPGGVASLLQVTDLKNSPGPAKKDLRVAMKQVLDLFQDNYPELVARNILINVPFWYYAFSTLFYPFMTQRTKSKFVIARPSKVTETLLKYIPIEAIPVKYGGLKRDDDTEFSAEDSEVTELVVKASSTETIEIEATEGDTTLTWDLTVLGWEVNYKEEFVPSEEGSYTVIVKKGKKMGSSEAAVRNSFRAGEPGKVVLTVENLTHRKKKVLFRHKAKSACAKEC

SEQ ID NO: 9 - DNA, 1058 bp, Brassica napus
gcgacgtcgttttactgaagttcctacgcgctagggacttcaaggtgaaagattcgctggcaatgctcaagaacacagtcaagtggagaagggagttcaagatcgacgagttggtcgatgaagactttgtggatgatcttgacaaggtcgtgttcatgcacggacacgaccgtgaaggccacccggtgtgttacaatgtctacggcgagttccagaacaaggagctttacaacaagacgttctccgatgaggagaagaggaagcatttcttgaggacgaggattcagttcttggagaggagtataaggaagctagacttcagctccggtggtgtttccaccatttttcagattaatgatatgaagaactctccggggttggggaagaaagagcttagatcggcgaccaagcaagccgtgcagttgcttcaggacaattaccctgagtttgtcttcaaacaggccttcatcaatgttccctggtggtaccttgtgttttacactgtgattggtccgttcatgacaccaagatcaaagagcaagttggtgtttgctggtccgtcaagatcagccgaaactcttttcaaatacatatcgcccgaacaagtcccggtacaatacggaggattgagtgtagatccttgtgactgcaatccagacttctctttggatgatccagcctcagaggtcattgttaagcctggaacaaagcaaactgttgagatcataatctatgagaaatgtgagattgtgtgggagataagggtaattggatgggaagtgagctacaaggcagagtttgtgcctgaagagaaagatgcttatacggtggttgtacagaaaccgaggaagatgaaaccattcgatgaaccggtgttaacccagagcttcaaagtgaatgagcttggcaaggttttactcactgtagacaacccaacctctaagaagaagaagctcgtttacaggttcaatgtcaaaccactctgaagtgagatgtcttctttgtgtttttgtatatgtgagtgtttggtatatcatatcatatcattttgtatttgt

SEQ ID NO: 10 - protein, 307 aa, Brassica napus
MLKNTVKWRREFKIDELVDEDFVDDLDKVVFMHGHDREGHPVCYNVYGEFQNKELYNKTFSDEEKRKHFLRTRIQFLERSIRKLDFSSGGVSTIFQINDMKNSPGLGKKELRSATKQAVQLLQDNYPEFVFKQAFINVPWWYLVFYTVIGPFMTPRSKSKLVFAGPSRSAETLFKYISPEQVPVQYGGLSVDPCDCNPDFSLDDPASEVIVKPGTKQTVEIIIYEKCEIVWEIRVIGWEVSYKAEFVPEEKDAYTVVVQKPRKMKPFDEPVLTQSFKVNELGKVLLTVDNPTSKKKKLVYRFNVKPL

SEQ ID NO: 11 - DNA, 1092 bp, Helianthus annuus
tcccgcgtcgacgatttcgtatgatcttgagaaagttgtgattaatcatggctttgataaagaaggacacccagattaatataatgtgtatggtgagtttcagaacaaagagttgtataataaaatgtttagtgataatgaaggaagattgaggtttttaaggtggagaattcagtatcttgaaaggagtataaggaagttggattttaggcctggtggggtgaatactatttttcagattagtgatttgaagaactcgcctggaccggcgaaacgggagcttcggttagccaccaggcaagctctgcagattctgcaggataactaccctgaatttgtggcaaaacaggttttcatcaatgccccttggtggtatttagctttctatacaatgattagtccattcatgactcaaaggactaaaagcaagtttgtattcgctagcacggccaagacacccgaaacccttttcaaatacgtgaatccggagcacgtaccaattcagtacggcgggttaagcgtagattactgcgattgcaatcccgaattcacaattgatgatccggcttcagtggtcaccgttaaaccagctaccaagcagaccgtggagattatagtaaacgagaaatgcttatttgtatgggagctacgtgtagtcggttgggaggtgagctatagtgctgaatatgtgccgaacaacgaaagccattacacgataatcatacaaaaggctagaaagatgactccaaccgatgaaccagtgatcagtcacagtttcaagatcagtgagcttggtaagatacttctaaccgtcgacaacccgacctccaagaagaaaacactgctctataggttcaaggtgaacccgctttccgaatagaataacgtacatcaaggatcgacagacagacagtcatatgatcgcgcgagtttattatttatttatgtttttatttgtttctttttggtagttgttatgagtttgggtccatggtgttgtgtttgggttcaaaaggcttgtggtttttgtattaatgtcttttggctttcacaaaatcggttgctgaaatttgactgatcgagttctatttt

SEQ ID NO: 12 - protein, 251 aa, Helianthus annuus
MFSDNEGRLRFLRWRIQYLERSIRKLDFRPGGVNTIFQISDLKNSPGPAKRELRLATRQALQILQDNYPEFVAKQVFINAPWWYLAFYTMISPFMTQRTKSKFVFASTAKTPETLFKYVNPEHVPIQYGGLSVDYCDCNPEFTIDDPASVVTVKPATKQTVEIIVNEKCLFVWELRVVGWEVSYSAEYVPNNESHYTIIIQKARKMTPTDEPVISHSFKISELGKILLTVDNPTSKKKTLLYRFKVNPLSE

SEQ ID NO: 13 - DNA, 1409 bp, Zea mays
cggccgcgctcccggcgtccgagctccgcgcgctcgccgacctcaaggcgctgctcgccacccacccggaccccatctccatctggggcgtcccgctgaaccctcgctcccctcccgccgcggcggacgacgccgccccggtcgacgagcgcgccgacgtggtgctcctcaagttcctccgcgcgcgggacttccgcgtccgcgacgcccacgccatggtgctccgctgcgccgcctggcgcgccgagttcggcgccgacgccgtgctggacgaggagctgggcttcaaggacctggagggcatcgtcgcctacatgcacggctgggaccgcgacggccaccccgtctgctacaacgcctacggcgtcttcaaagacagggacatgtacgagcgcgtcttcggcgacggcgaccgcctcgcgcgcttcctccgctggcgcgtccaggtcatggagcgtggcgtgcgcgcgctcaccctgaggcccgggggcgtcaacgccatcatacaggtcaccgacctcaaggacatgccaaagcgggagctcagagccgccagcaaccagatcctctccctcttccaggacaactacccggagatggtagcgcggaaggtgttcattaacgtgccgtggtacttctccgtgctcttctccatgatctcgcccttcctcacggagcgcaccaagagcaagttcgtcatcgcgcgcgagggcaacgtcgccgagacactctacaagttcatccggccggagctggtgcctgtgcagtacggcgggctgagccgcaccggtgacctcgagaacggaccaccgaagccggcgtccgagttcaccatcaagggtggcgagaaggtcttcctggagatcgacggtatcgaggccggtgcaacgataacgtgggatctggtcgtcgggggctgggacctcgagtacggagccgagtacgtgccggcggccgaggacagctacacgctctgcgtggagaagacgaggatggtctcggccaccgccgaggagcccgtgcacaatgccttcacggctagggaagccggcaagatggtgctgtccatagacaattctggttcccggaagcgcaaggttgccgcctacaggtacttcgtgcgcaagtcgtcggcgtaggcatgctgatgtcttgtggtggtcgtcgcggccggcaccttgccggcaggtagccgcgagggggaggttaacgtggaacaactggtgaagtgtttacttgggcttgtgggatttggtggggagaggtcaagttaggctgtttaattattagtgctataacgacatgcatgtattatgccatatgtagaatataatgtactccgtaagagctgttgcacttttgtcatcaccactgttataaagctaatgatgagttaagttttttgggct

SEQ ID NO: 14 - protein, 307 aa, Zea mays
MVLRCAAWRAEFGADAVLDEELGFKDLEGIVAYMHGWDRDGHPVCYNAYGVFKDRDMYERVFGDGDRLARFLRWRVQVMERGVRALTLRPGGVNAIIQVTDLKDMPKRELRAASNQILSLFQDNYPEMVARKVFINVPWYFSVLFSMISPFLTERTKSKFVIAREGNVAETLYKFIRPELVPVQYGGLSRTGDLENGPPKPASEFTIKGGEKVFLEIDGIEAGATITWDLVVGGWDLEYGAEYVPAAEDSYTLCVEKTRMVSATAEEPVHNAFTAREAGKMVLSIDNSGSRKRKVAAYRYFVRKSSA

SEQ ID NO: 15 - DNA, 1160 bp, Glycine max
accatgctgaagaacacgatccagtggaggaaggagtttgggatggaggagctgatggaagagaagctcggggatgagttggagaaggtggtgttcatgcacggctttgacaaggagggtcaccctgtgtgttacaacatatatgaggagttccagaacaaggagttgtacaagaagactttttctgatgaggagaagagggagaagttcctgaggtggagaattcagttcctggagaagagtataaggaagcttgatttcaaccctggtggcatatgcaccattgttcatgttaatgacctcaagaactctcctggacttgccaagtgggaacttagacaagccaccaaacatgccctacaattgcttcaagacaattaccctgaatttgttgccaaacaggtttttattaatgtgccttggtggtacctggcagtgaataggatgataagcccttttcttactcagaggactaaaagcaagtttgtctttgctgggccttccaaatcaacggaaacccttttgagatacatagctccggagcagcttcccgtgaagtacggtggactaagcaaagatggggagttcggaaatatcgatgctgtcacagaaatcacagtgaggccggcagcaaaacatacagtggaattttcagttactgagaactgcttactctcttgggagcttagagtaataggatgggaagtaagttatggcgcagaatttgtgccaagctcagaaggaagctacacagtaattgtccagaaggctaggaaggttgcttcatcagaagaaccagttctttgcaacagttttaaggttggtgaacctgggaaagttgttctcaccattgacaacacaagctctaagaagaagaagctcttgtatcgcttgaagaccaagccttccccttctgactaaaatcatcattgttatgtgtatgtgcaagtgggaaggggaagaacagtgccagaattgtttgcttacattcctgcatcaacttctaccaagacaccagtgcttcaaagattaactttccagctgttcatatatgaatataaagtttttgtttttaattttttggcctttttgttttgatgattattatgtgttcaaccatattatataattatatatacctctttctgtgtttttcttgc

SEQ ID NO: 16 - protein, 305 aa, Glycine max
MLKNTIQWRKEFGMEELMEEKLGDELEKVVFMHGFDKEGHPVCYNIYEEFQNKELYKKTFSDEEKREKFLRWRIQFLEKSIRKLDFNPGGICTIVHVNDLKNSPGLAKWELRQATKHALQLLQDNYPEFVAKQVFINVPWWYLAVNRMISPFLTQRTKSKFVFAGPSKSTETLLRYIAPEQLPVKYGGLSKDGEFGNIDAVTEITVRPAAKHTVEFSVTENCLLSWELRVIGWEVSYGAEFVPSSEGSYTVIVQKARKVASSEEPVLCNSFKVGEPGKVVLTIDNTSSKKKKLLYRLKTKPSPSD

SEQ ID NO: 17 - DNA, 2212 bp, Triticum aestivum
ccacgcgtccgctctccccctctccctcctgctctatctttctcaccgcaaaagcttgaaacaccccgcggagatggcagaggagccgcagccacaggccgccgccgcccccgccgccgcggccacggaggtggtcgtcgccgagaaggcgccggcggaggtggagaagaaggccgaggagcccgcggcggaggcggaggccgaggagacggccgccgttgccgacgacgggggcgccgtcgaggccaccggctctttcaaggaggagagcaacctcgtcgccgacctgcctgacccggagaagaaggcgctcgacgagttcaaggagctgatcgtcgccgcgctcgccgccggtgagttcaatctgccccctcccccgccgccgccgaaggccaagactgaggccgccgcagaggagaccaagacggaggcgccggccaaggaggaggccaagaccgaggagccggccaaggcggaagaaccagccaaggaggagcccaaggctgaagagccggccaaggccgaggcggcagcggcggagccagcagccgaggagcccaaggccgtggtcgctgccgaggcagcagccgaggagccggccaaggaggaacccaaggccgaggaggccaagccggccgagccaaagaaggaggaggaagcagtcgtggtcgccgaggagggcaccaagacggcggaaccggtcgaggaggccgccgccgccgccaccaccacagagcaggcagcggcgccggaaccggaggcggaggcagccgcgcccgagccggtgttcatctggggcgtgccgctggtgggcgacgacgagcgcacggacgcggtgctgctcaagttcctgcgcgcgcgggagttcaaggtgaaggaggcgatggcgatgctccggtccgccgtgctctggcggaagcgcttcggcatcgagtcgctcctggaggcggacctggccttcccggagctggagaaggtggtgttctaccgcggcgccgaccgggagggccaccccgtctgctacaacgtgtacggcgagttccaggacaaggaggtgtacgagaaggcgttcggcgacgaggagaagcgggagcggttcctcaagtggcgcatccagctgctggagcgcggcatcctgtcgcagctggacttcgcgcccagcggcatctgctccatggtgcaggtcaccgacctcaagaactcgccgcccatgctcggcaagcaccgcgccgtcacccgccaggccgtcgccctgctccaggacaactaccccgagttcatcgccaagaaggtgttcatcaacgtgccatggtggtatctcgctgccaacaaaatgatgagccctttcctcacccagcgcaccaagagcaagttcgtgttcgccagccaggccaagtcacccgagaccctcttcagatacatcgcgccggagcaagtccccgtccaattcggaggcctcttcaaggaagatgaccctgatttcaccacctccgactctgtcaccgagctcaccatcaaagcttcatccaaagaaaccattgagatccctgtcaccgagaactcaacgattgtatgggagctccgggtgctcggctgggaggtcagccacggcgcggagttcacccccgacgctgagggcgcgtacaccgtcatcgtgcagaagacaaggaaggtccccgcgaatgaggagcccatcatgaagggcagcttcaaggccggcgaggccggcaagatcgtgctcacggtcagcaacgccgcgtcgaagaagaagaagctcctctacagatccaaggtgaagtgcagcaccggcgagtccgttgaggccgacattccatgaccaccattggagtcagtccctgatgatgatagaagaagaagaagaagaagaagataaaccgcctttttggtttttgttctttgattccattggttttgtggtttttggttcgcattcccgcatttgtttaattattaaaattaaaaacccaaagtgagcttgattttgtgacggtacagtagttgggagaggaaggttggtatggatgggatgatataatggcatcgtgatggttgttgagggtagggcaagaggagaaaaatggatgatacaatctgctgctgctctgtaaatttgtctgtacattgttgcaatcgctggctggatcctcatggacatgttatatttagaagtacctgctgccatcaaaaaaac

SEQ ID NO: 18 - protein, 587 aa, Triticum aestivum
MAEEPQPQAAAAPAAAATEVVVAEKAPAEVEKKAEEPAAEAEAEETAAVADDGGAVEATGSFKEESNLVADLPDPEKKALDEFKELIVAALAAGEFNLPPPPPPPKAKTEAAAEETKTEAPAKEEAKTEEPAKAEEPAKEEPKAEEPAKAEAAAAEPAAEEPKAVVAAEAAAEEPAKEEPKAEEAKPAEPKKEEEAVVVAEEGTKTAEPVEEAAAAATTTEQAAAPEPEAEAAAPEPVFIWGVPLVGDDERTDAVLLKFLRAREFKVKEAMAMLRSAVLWRKRFGIESLLEADLAFPELEKVVFYRGADREGHPVCYNVYGEFQDKEVYEKAFGDEEKRERFLKWRIQLLERGILSQLDFAPSGICSMVQVTDLKNSPPMLGKHRAVTRQAVALLQDNYPEFIAKKVFINVPWWYLAANKMMSPFLTQRTKSKFVFASQAKSPETLFRYIAPEQVPVQFGGLFKEDDPDFTTSDSVTELTIKASSKETIEIPVTENSTIVWELRVLGWEVSHGAEFTPDAEGAYTVIVQKTRKVPANEEPIMKGSFKAGEAGKIVLTVSNAASKKKKLLYRSKVKCSTGESVEADIP

SEQ ID NO: 19 - DNA, 1393 bp, Triticum aestivum
ggtccggaatttccgggtcgacccacccgtccgggaggagcccaaggccgaggaggccatcgaggagaccgccgtccccgccgcggccgagccggaggcggcgcccgccgccgagcccaaggaggagctgatctggggcgtgccgctggtgggcggcgacgagcgcacggacacggtgctcctcaagttcctccgcgcgcgcgagttcaaggtgaaggaggccatggcgatgctcaaggcggcggtgctgtggcgcaagagcttcggcatcgacgcgctcctgggcgccgacctcggcgtgccggagctggagaacgtcgtcttctaccgcggcgccgaccgcgagggccaccccgtctgctacaacgtctacagcgagttccaggacaaggacctctacgagaaggccttcggcgacgacgagaagcgggagcgcttcctcaggtggcgcatccagctcctcgagcgcggcatccgggagcagctcgacttctcgcccagcggcatctgctccatggtgcaggtcaccgacctcaagaactcgccgcccatgctcggcaagcaccgcgccgtcacccgccaggcgctcgcgctgctccaggacaactaccctgaattcatcgccaagaaggtgttcatcaatgtgccatggtggtatcttgcggcaaacaagatgatgagcccattcctcacacagcgcaccaagagcaaattcacgttttgcagcccagccaagaccgcagagaccctattcagatacatcgcgccggagcaggtccctgtccaattcggcggcctctacaaagaggatgatactgaattctccacttctgatggcgtgaccgagctcactgtcaaaccttcttccaaagaaactgttgagattcctgctactgagaactccacggtcgtgtgggagctccgtgtgcttggatgggaggtgagctacggcgtggagttcaccccggacgccgagggcggctacacggtcatcgtgcagaagactcggaaggtgcccgccaacgaggagccaatcatgaagggtagcttcaaagcgagcgagcctggcaaggtggtgctcatcgtcaacaacccgacgtcgaagaagaagaagctgctgtgccgattcaaggtgaagagctccaccgaatcctccgcctgatgaggttccagctgctgatacaaccgccaaccaggtccataccaccgccaccatttgaacatgtcgcatgataggggagagcaaataagattttagtagatggccgttttcgtgtcgggttctttgatttgttggcttgctgttttttgggggtcggatttgtatgtgtgtttactcggaaccaaagtgggcttgttctatgaatgagataggtactcctggctgggatcc

SEQ ID NO: 20 - protein, 312 aa, Triticum aestivum
MAMLKAAVLWRKSFGIDALLGADLGVPELENVVFYRGADREGHPVCYNVYSEFQDKDLYEKAFGDDEKRERFLRWRIQLLERGIREQLDFSPSGICSMVQVTDLKNSPPMLGKHRAVTRQALALLQDNYPEFIAKKVFINVPWWYLAANKMMSPFLTQRTKSKFTFCSPAKTAETLFRYIAPEQVPVQFGGLYKEDDTEFSTSDGVTELTVKPSSKETVEIPATENSTVVWELRVLGWEVSYGVEFTPDAEGGYTVIVQKTRKVPANEEPIMKGSFKASEPGKVVLIVNNPTSKKKKLLCRFKVKSSTESSA

SEQ ID NO: 21 - DNA, 2018 bp, Glycine max
  misc_feature (1862)..(1862): n is a, c, g, or t
  misc_feature (1878)..(1878): n is a, c, g, or t
  misc_feature (1889)..(1889): n is a, c, g, or t
  misc_feature (1922)..(1922): n is a, c, g, or t
  misc_feature (1929)..(1930): n is a, c, g, or t
  misc_feature (1936)..(1936): n is a, c, g, or t
  misc_feature (1962)..(1962): n is a, c, g, or t
  misc_feature (1971)..(1972): n is a, c, g, or t
  misc_feature (2006)..(2006): n is a, c, g, or t
gaagcaactcttgtcttccctttcaacttcaactcaaccctcaatcaaactcattctgtcttttcttctatttttatttctatccaatcatccatggccgaggaaccccaaaaaccagcctccgctgaagaagtggtcgctgttcctgcggagaacccaccatctgaagccgaagctgaaaacatcgaagcagagaaggcccagagtggtgtagaagacaagatttcccagtcggtttcgttcaaggaggagaccaacgtggttggcgacctccccgaggcgcagaagaaagcccttgatgagctcaagaagcttgttcaagaagcgctcaacaaccatgagctaactgctcccaagccagaaccggagaagaagaaaccagcagcagagaagaaggaggaagttgaagtgacagaagggaagaaggaagctgaagtcatagaagagaagaaggaagtggaagtgacggaagagaagaaggaaattgaagtaacagaagagaagaaggaagctgaagtcatagaagagaagaaggaagtggaagtgacggaagagaagaaggaaattgaagtaacagaagagaagaaggaagcagaagtgaaagaagagaagaaggaaggggaagtgacggaagagaagaaggaagttgaagtgacggaagagaagaaggaagcggaagtgatagtagaagagaagaaggaagttgaagtgacggaagagaagaaggaagtggaagtgaccgaaggaaagaaagaagtggaagtgatcgaagagaagaaggaaacagaagtgacagaagaaaagaaagaagtggaagtagaagtgagggaagagaagaaggaaagtgaagtgaaagaagaagaaaaaggtcgggaggttgttccagaggaagttgagatatggggaattcccctgctgggggacgagaggagcgatgtgattctgctaaagtttcttagggcaagggatttcaaggtgaaggaggccttgaacatgataagaaacacggtgcgatggagaaaggaatttggaatagagggtctagtggaggaagatcttggaagtgattgggagaaggtggtgttcaaggatggatacgacaaagaagggcacccggtgtactacaacgtctttggggagtttgaggacaaggagttgtacagcaagacgtttttggacgaggaaaagaggaacaagttcataaggtggaggattcagtcgttggagaagagcgttagaagccttgacttctctccgaatgggatatcgacaatagttcaggtgaacgaccttaagaactctcccggactgggcaagagggaactgaggcaggccaccaatcaggcccttcaactgcttcaggacaactaccctgagttcgttgccaagcagatattcatcaatgtcccctggtggtaccttgccttttctaggatgatcagtcccttcttcacacagaggaccaagagtaaatttgtttttgctggcccttccaaatctgctgatacccttttcagatatatagctccggagctggtcccggttcaatacggtggtcttagcagagaggctgaacaggaattcacctctgcttaccctgttacggagtttactattaaacccgctaccaaacattctgttgagttccctgtttctgagaaaagccatcttgtttgggaaatccgagtggtgggttgggatgtcagctatggagctgaatttgtgcccagcgctgaggatggatacactgtcatagtacacaagagcaggaaaattgctcccgctgatgagaccgttcttaccaacggtttcagaattggtgaacctggcaagattgtactcaccatagacaaccaaacatncaagaagaagaaactnctctacaggtnccagaccaaacccattgcagagtaagcttgatnaggatgnntactgntactgtatattcatcattacaaccancacaacatnngtggttgggcgagggacttattctttcatacggngtcttcttttct

SEQ ID NO: 22 - protein, 606 aa, Glycine max
  UNSURE (590)..(590): Xaa can be any naturally occurring amino acid
  UNSURE (599)..(599): Xaa can be any naturally occurring amino acid
MAEEPQKPASAEEVVAVPAENPPSEAEAENIEAEKAQSGVEDKISQSVSFKEETNVVGDLPEAQKKALDELKKLVQEALNNHELTAPKPEPEKKKPAAEKKEEVEVTEGKKEAEVIEEKKEVEVTEEKKEIEVTEEKKEAEVIEEKKEVEVTEEKKEIEVTEEKKEAEVKEEKKEGEVTEEKKEVEVTEEKKEAEVIVEEKKEVEVTEEKKEVEVTEGKKEVEVIEEKKETEVTEEKKEVEVEVREEKKESEVKEEEKGREVVPEEVEIWGIPLLGDERSDVILLKFLRARDFKVKEALNMIRNTVRWRKEFGIEGLVEEDLGSDWEKVVFKDGYDKEGHPVYYNVFGEFEDKELYSKTFLDEEKRNKFIRWRIQSLEKSVRSLDFSPNGISTIVQVNDLKNSPGLGKRELRQATNQALQLLQDNYPEFVAKQIFINVPWWYLAFSRMISPFFTQRTKSKFVFAGPSKSADTLFRYIAPELVPVQYGGLSREAEQEFTSAYPVTEFTIKPATKHSVEFPVSEKSHLVWEIRVVGWDVSYGAEFVPSAEDGYTVIVHKSRKIAPADETVLTNGFRIGEPGKIVLTIDNQTXKKKKLLYRXQTKPIAE

SEQ ID NO: 23 - DNA, 1642 bp, Glycine max
gaaatgaaagctaaggaaaggaagggtaaaggagcgtaaaactggaggagtttgtgtcttgttttcttgtggcggggcataggattccgaataaatgcatgtttcaactttcctttttcttctctcagtctctctagctagctttcttctccactctctcaaatggcccaaaatgattccaaccctactccgcctccggaaccccatgtagcggcggaacccattactgaggatttggtccaagacaaagaagaagaggatgatagtagtaagattgttattccagtcccagagagcgagtccttgtcattgaaggaggatagcaatagggtttctgattccgagaaaaatgccattgatgagctgaagaagctcctgaaagaggaattagaggacgaggaggtttccatctggggcgtccctctctttaaggatgacaggactgacgtcattctcctcaagtttctcagagctcgtgagctcaaagtgaaggacgcccttgtcatgtttcaaaacactctccgatggaggaaggacttcaacatcgacgcccttctggatgaagatctgggcgaccacttggagaaggttgtcttcatgcacggacacggcagagagggccatcccgtctgttacaacgtctacggcgagttccagaacaaggacctctaccacaaggccttctcctctcaggataatcgaaacaagtttctccgatggcgtattcagttgttggagcgcagtattcggcacctcgacttcactccttcctccggcatcaacaccattttccaagtcaatgacctcaaaaactcccctggccctgctaaacgtgagcttcgccttgccaccaaacaagctttgcagttgcttcaggacaactatcccgaatttgttgccaaacaggtttttatcaacgtcccatggtggtatcttgctttctataccatgatcaatcccttcttgacttcgaggaccaaaagcaaatttgtctttgctggaccatccaagtcccccgatactcttttcaagtatatttctcctgagcaagtgcccgttcagtatggtggcctcagtgtagatttctgtgactgcaaccccgatttcactatgtctgatcctgtcaccgaaattcctataaagcctaccactaagcaaactgtggaaattgctatttatgagaagtgcattattgtttgggagctgcgcgtggtgggctgggaggttagctacaatgctgaattcaagcctgatgttgaagatgcatatacggttatcatacagaaggccacaaagatgtcccccaccgatgaaccagttgtttccaatagctttaaagttgttgaactgggaaaattgttgctcaccatagacaatcctaccttgaaaaaaaagaggcttctttacaggttcaagatcaaaccctactctgattgagagaaaataacctctggtggtggttttgggtacatgaaggaaattgaacttgaagagtaagaaatatgcatgtcatcatttgttcggtccatttttcatctatagttttggtcgtgagttgtttgcagattgtctttctctgtctttgttggttggtggggtgtttgaacactttattgctagtctaaattgttctttaattttc

SEQ ID NO: 24 - protein, 424 aa, Glycine max
MAQNDSNPTPPPEPHVAAEPITEDLVQDKEEEDDSSKIVIPVPESESLSLKEDSNRVSDSEKNAIDELKKLLKEELEDEEVSIWGVPLFKDDRTDVILLKFLRARELKVKDALVMFQNTLRWRKDFNIDALLDEDLGDHLEKVVFMHGHGREGHPVCYNVYGEFQNKDLYHKAFSSQDNRNKFLRWRIQLLERSIRHLDFTPSSGINTIFQVNDLKNSPGPAKRELRLATKQALQLLQDNYPEFVAKQVFINVPWWYLAFYTMINPFLTSRTKSKFVFAGPSKSPDTLFKYISPEQVPVQYGGLSVDFCDCNPDFTMSDPVTEIPIKPTTKQTVEIAIYEKCIIVWELRVVGWEVSYNAEFKPDVEDAYTVIIQKATKMSPTDEPVVSNSFKVVELGKLLLTIDNPTLKKKRLLYRFKIKPYSD

SEQ ID NO: 25 - DNA, 2353 bp, Zea mays
tccgccccgccctgtcgctttcccttccacacgcgccgttcgctttgatcgaccaggcaggcatggccgacgagacgaagcaagaagccgccgccccggcggccgaggtggtcgtgacggaggaggagaagaaggcagaagagaccgccccggtggcggaggaaaaggccgtggaggcggctgtagagaaggccgcggaggcggaggcgggggccgaggaaaaggccgcggaagcggactcggaggaggagaagaaggcggaggaggccgaggaggccgccgcgggcgatgaggcggccgtgatcgatggcactgggtcgttcaaggaggagagtaacctggtgtccgagctccccgaccctgagcgcacagcgctcgcgcagctcaaggagctcgtcgccaccgcgctcgctaacggggagttcaacctgccgccgccgcctgccaaggaggaggccaagaaggaggagccggcaaaggaagaagctccggcggacaaggaggacgagcccaaggcagaggaggcggctgcccaagagcccgtcaaggaggaggccaagcctgaggagcccaaaacggaggcgccggcggaagcagcgcccgaggaggttaaggacgagacacccgtgccggaagagaccaagactgaggctcccgcgccggaggagcccaaggccgaggagcctgccaaggaggagctcaaggcagaggcggcgacggaagcggtcgccgaggagaccaaaccagctgagccggtgccggaggaggaggagaagacggtcgttgttgccgaggaggaggccaccaaaacggtggaagccatcgaggagacggtcgccgtcgccgtcgccgccgccgcgtccgaggagcccgaggcgggcgagccgaaggaggagctgatctggggcgtgccgctggcgggcgacgacgagcgcacggacacggtgctgctcaagttcctccgcgcgcgcgagttcaaggtgaaggaggcgatggcgatgctcaagtcggcggtgctgtggcgcaagcggttcggcatcgacgagctcctcctggacgccgacctcggcctgcgggagctggagggcgtggtgttctaccgcggcgccgaccgcgagggccacccggtctgctacaacgtgtacggcgagttccaggacaaggagctgtacgagagggccttcggcgacgaggagaagcgggagcgcttcctcaagtggcgcatccagctcctggagcgcggcatccgggagcagctcgacttctcgcccagcggcatctgctccatggtgcaggtcaccgacctcaagaactcgccgcccatgctcggcaagcaccgcgccgtcacgcgccaggctctcgccctgctacaggacaactacccggagttcgtggccaagaaggtgttcatcaacgtgccgtggtggtacctggcggcaaacaaggtgatgagcccattcctgactcagcgcaccaagagcaagatcgtcttctgcagccctggcaagtcggcggagaccctcttcagatacatcgccccggagcaagtccccgtccagttcggcggcctgtacaaggaggacgacacggagttctccacctccgacgccgtcaccgagctcaccgtgaaaccgtcctccaaggagaccgtcgagatcccagccaccgagaactccaccgtggtgtgggagctccgcgtgctggggtgggaggtgagctacggcgccgagttcacccccgacgcggagggcggctacaccgtcatcgtgcagaagacgcggaaggtccccgcccacgaggagcccatcatgaagggcagcttcaaggccacggagcccggcaagctggtgctgggcgtgaacaacccggcgtccaggaagaagaagctgctgtgccggttcaaggtgaggagcgccgccgcctgatgagggtcgttggtctgggtcccagcaggtacagcctgccagctgcttgaccaccagcccgacatgtataattcgatcgatcgccaaccaggtccataccgccaccatttgaatgaacatgctgcattgcattacatgataggagagagagagagagagagagaggacaataaagagtttctgcttcctagctaggcccgttccgtgtcctggtcgttctttgattatttgttggcttgctgttcttttttttccttggggggagggtcgcgtttgtatgtgtttattacttgaatgaaaacaaaagtgagcttgttaatgaaaaaaaaaaaaaaaaatgttgaggtcaccgtggtccgtggtggggtgggggaagaagaacagtaacagttgctgcccggcctgtacatttctttcaaaaaaaaaaa

SEQ ID NO: 26 - protein, 620 aa, Zea mays
MADETKQEAAAPAAEVVVTEEEKKAEETAPVAEEKAVEAAVEKAAEAEAGAEEKAAEADSEEEKKAEEAEEAAAGDEAAVIDGTGSFKEESNLVSELPDPERTALAQLKELVATALANGEFNLPPPPAKEEAKKEEPAKEEAPADKEDEPKAEEAAAQEPVKEEAKPEEPKTEAPAEAAPEEVKDETPVPEETKTEAPAPEEPKAEEPAKEELKAEAATEAVAEETKPAEPVPEEEEKTVVVAEEEATKTVEAIEETVAVAVAAAASEEPEAGEPKEELIWGVPLAGDDERTDTVLLKFLRAREFKVKEAMAMLKSAVLWRKRFGIDELLLDADLGLRELEGVVFYRGADREGHPVCYNVYGEFQDKELYERAFGDEEKRERFLKWRIQLLERGIREQLDFSPSGICSMVQVTDLKNSPPMLGKHRAVTRQALALLQDNYPEFVAKKVFINVPWWYLAANKVMSPFLTQRTKSKIVFCSPGKSAETLFRYIAPEQVPVQFGGLYKEDDTEFSTSDAVTELTVKPSSKETVEIPATENSTVVWELRVLGWEVSYGAEFTPDAEGGYTVIVQKTRKVPAHEEPIMKGSFKATEPGKLVLGVNNPASRKKKLLCRFKVRSAAA

SEQ ID NO: 27 - DNA, 2151 bp, Zea mays
caacaatctctctcccctcactccctctctgcagcgcgcagctttcaaagcgttgggagagatggcagaggagacgcaaccagaggccgcagccgccgccgcgcccgccgcggccgaggtagtcgtgaccgaagctgcgccggcggaggcggaggtgcctgtggcggcggaagctgaagccgaggccaaggatgagaagaaaggtgacgaggcggagctcaccgccgatgacgcgggggtggggaccggctcgttcaaggaggaaagcaacctggtggaagacctgcccgacccggagaagaaggcgctcgacgagttcaagcagctgatcgctgccgccctcgccgccggtgagttcaacctgcctcccccgccgccgccgccgaaggccaaggagacgaaggtggaggaagccaaggccgaggagcccgccaaagaagagcccgcggccgaggcggaggctacggcggaggagcccaaggcccaggtggctgcggatgccccggttgaggaggtcaagacggaggtgccgccggccgaggaggccaaggctgagacactggctgaggaagccaagccttccgagcccgagccgcaggagaagaccgtcgtggtcactgaggaggagactgccaccaagacggtggaagcaatcgaggaaaccgtcgtgtccgcccccgccgccatcccggaggaagcagcggcgccagaggcggtggtcgaggctcaggcgaccgcgcctgaacccgtgctgatttggggcgtgccgctggtcggcgacgacgagcgcacggacacggttctgctcaagttcctgcgtgcgcgggagttcaaggtgaaggatgccatggcgatgctcaagtccgcggtgctgtggcgcaagcgcttcggcatcacctcgctcctcgacgccgacctcggcctgacggagctggagaacgtggtgttctaccgcggcacggaccgcgaaggccaccccgtgtgctacaacgtctacggtgagttccaggacaaggatctctacgagaaggccttcggcgacgatgagaagagggagcgcttcctcaagtggcgcatccagctgctggagcgcggcattctgtcgaagctggacttctcgcccagcggcatctgctccatggttcaggttaccgacctcaagaactcgccgcctatgctcggcaagcaccgcgccgtcacccgccaggctgtcacgctgctccaggacaactaccccgagttcattgccaagaaggtgttcatcaatgtgccgtggtggtatctagccgccaacaagatgatgagcccgttcctcacacagcgcaccaagagcaagttcgtctttgctagcccagccaaatcagcagcgactctattcagatacatcgcaccggaacaagttcctgtccaatttggaggcctcttcaaggaggatgatcctgagttcaccacctctgacactgtctccgagctcactatcaaaccatcctcaaaagaaaccgttgagatccctgtcaccgagaactccacaattgtatgggaactccgggtgctgagttgggaagtgagctatggcgccgagttcacccccgacgcggagggtgggtacaccgtcattgtacagaagacaaggaaggtgcctgctaacgaggaaccgatcatgaagggaagcttcaaggcaggcgagcctggcaaacttgtgctaactgtgaacaaccctgcatccaagaagaagacgctcctttacagatcgaaggtgaagagcaccagcgagtgagtgtgaggtcacgccgctagctgcctgggccctacagttaaaacgatctacagcatgatagaagagagaaggaaccttttggtttggttcgttaatttactgggttttttttttgggttcgcattctacattttgtttggttgaaaccaaagtgagcttgtttttgtgacagtagatgggagaagtataatggcattgtgtgatggatggttgttgatgagggcagggaggacgaaaatgtgggggaatgaaaggttggagaatgtctgttcctctgtagatgtgttctgtacattgcatctcttggattctcattgatatgttaaaatttaggagtacttggtcacatcattattcaatccatgttactctgc

SEQ ID NO: 28 - protein, 571 aa, Zea mays
MAEETQPEAAAAAAPAAAEVVVTEAAPAEAEVPVAAEAEAEAKDEKKGDEAELTADDAGVGTGSFKEESNLVEDLPDPEKKALDEFKQLIAAALAAGEFNLPPPPPPPKAKETKVEEAKAEEPAKEEPAAEAEATAEEPKAQVAADAPVEEVKTEVPPAEEAKAETLAEEAKPSEPEPQEKTVVVTEEETATKTVEAIEETVVSAPAAIPEEAAAPEAVVEAQATAPEPVLIWGVPLVGDDERTDTVLLKFLRAREFKVKDAMAMLKSAVLWRKRFGITSLLDADLGLTELENVVFYRGTDREGHPVCYNVYGEFQDKDLYEKAFGDDEKRERFLKWRIQLLERGILSKLDFSPSGICSMVQVTDLKNSPPMLGKHRAVTRQAVTLLQDNYPEFIAKKVFINVPWWYLAANKMMSPFLTQRTKSKFVFASPAKSAATLFRYIAPEQVPVQFGGLFKEDDPEFTTSDTVSELTIKPSSKETVEIPVTENSTIVWELRVLSWEVSYGAEFTPDAEGGYTVIVQKTRKVPANEEPIMKGSFKAGEPGKLVLTVNNPASKKKTLLYRSKVKSTSE

SEQ ID NO: 29 - DNA, 682 bp, Saccharum officinarum
  misc_feature (674)..(674): n is a, c, g, or t
cggacgcgtgggcaaaacggtggaagccatcgaggagaccgctgtcgcctccgccgtggccgaacctgaggcggaggccgcgccggcgccggcggccgagccgaaggaggagctgatctggggcgtgccgctggtgggcgacgacgagcgcacggacacggtgctgctcaagttcctccgcgcgcgcgagttcaaggtgaaggaggccctggcgatgctcaagtcggcggtgctgtggcgcaagcgcttcggcatcgacgagctcctgggcgccgacctcggcctgccggagctggagaacgtggtgttctaccgcggcgccgaccgcgagggccaccccgtctgctacaacgtctacggcgagttccaggacaaggagctctacgagaaggccttcggcgacgaggagaagcgggagcgcttcctcaagtggcgcatccagctcctcgagcgcggcatcagggagcagctcgacttctcgcccagtggcatctgctccatggtgcaggtcaccgacctcaagaactcgccgcccatgctcggcaagcaccgcgccgtcacacgccaggctctcgccctgctccaggacaactaccccgagttcgtggcccaagaggtgtttatcaatgtgccatggtggtacctcgcggcgaaacaagtgatgagcccattcnctgactca

SEQ ID NO: 30 - protein, 156 aa, Saccharum officinarum
  UNSURE (154)..(154): Xaa can be any naturally occurring amino acid
MLKSAVLWRKRFGIDELLGADLGLPELENVVFYRGADREGHPVCYNVYGEFQDKELYEKAFGDEEKRERFLKWRIQLLERGIREQLDFSPSGICSMVQVTDLKNSPPMLGKHRAVTRQALALLQDNYPEFVAQEVFINVPWWYLAAKQVMSPFXDS

SEQ ID NO: 31 - DNA, 837 bp, Saccharum officinarum
  misc_feature (563)..(563): n is a, c, g, or t
  misc_feature (588)..(588): n is a, c, g, or t
  misc_feature (755)..(755): n is a, c, g, or t
  misc_feature (760)..(761): n is a, c, g, or t
  misc_feature (771)..(773): n is a, c, g, or t
  misc_feature (807)..(807): n is a, c, g, or t
cctggagcagcgtgacaggacaactaccccgagttcattgccaagaaggtgttcatcaatgtgccgtggtggtatctcgctgccaacaagatgatgagcccgttcctcacacagcgcaccaagagcaagttcgtttttgctagcccagccaagtcagcagagactctattcagatacatcgcagcggagcaagttcctgtccaatttggaggcctcttcaaggaggacgaccctgagttcaccacctccgacactgtcgctgagctcactatcaaaccatcgtcaaaagaaaccattgagatccctgtcacggagaactccacaattgtatgggaactccgggtgctcggttgggaggtgagctatggtgctgagttcacccctgacgctgagggtgggtacactgtcattgtacagaaaacaaggaaggtgcccgctaacgaggaaccgatcatgaagggaagcttcaaggtacgcgagcccggcaaacttgtgctaactgtgaacaactcggcatccaagaagaagaagctccttcacagatcaaaggtgaagagcaccancgagtgagtgtgaggttgctgctanctgcctgggtcctacagttaaacgatctaccacagttaatctcagcatgatagaagagaggaaaaaccttttggtttggttcgttaatttattgggttttgcttgttttggtgcacattctacattttgtttggttaaacaaaagtgagcttgtttttggttgattnaaatnnatttccactnnnaaaaaaaaaaaaaataaatttaagggggggccgntttaaaaagggggggccgttcctataggaa

SEQ ID NO: 32 - protein, 159 aa, Saccharum officinarum
  UNSURE (158)..(158): Xaa can be any naturally occurring amino acid
  UNSURE (158)..(158)
MMSPFLTQRTKSKFVFASPAKSAETLFRYIAAEQVPVQFGGLFKEDDPEFTTSDTVAELTIKPSSKETIEIPVTENSTIVWELRVLGWEVSYGAEFTPDAEGGYTVIVQKTRKVPANEEPIMKGSFKVREPGKLVLTVNNSASKKKKLLHRSKVKSTXE

SEQ ID NO: 33 - DNA, 1143 bp, Saccharum officinarum
  misc_feature (1033)..(1033): n is a, c, g, or t
gcctgagcccgtgctgatctggggcgtgccgctggtgggcgacgacgagcgcacggacacggttctgcttaagttcctgcgagcgcgggagttcaaggtgaaggaggccattgcgatgctcaagtccgcggtgctgtggcgcaagcgcttcggcatcacctcgctcctcgacgccgacctcggcctgccggagctggagaacgtggtgttctaccgcggcgccgaccgcgagggccaccccgtgtgctacaacgtctacggcgagttccaggacaaggatctctacgagaaggccttcggcgacgatgagaagcgggagcgcttcctcaagtggcgcatccagctgctggagcgcggcatcctgtcgaagctggacttttcgcccagcggcatctgctccatggtccaggttaccgacctcaagaactcgccgcccatgctcggcaagcaccgcaccgtcacccgccaggctgtcacgctgctccaggacaactaccccgagttcattgccaagaaggtgttcattcaatgtgccgtggtggtatctcgctgccaacaagatgatgagcccgttcctcacacagcgcaccaagagcaagttcgtttttgctagcccagccaagtcagcagagactctattcagatacatcgcagcggagcaagttcctgtccaatttggaggcctcttcaaggaggacgaccctgagttcaccacctccgacactgtcgctgagctcactatcaaaccatcgtcaaaagaaaccattgagatccctgtcacggagaactccacaattgtatgggaactccgggtgctcggttgggaggtgagctatggtgctgagttcacccctgacgctgagggtgggtacactgtcattgtacagaatacaaggaaggtgcccgctaacgaggaaccgatcatgaagggaagcttcaaggtaggcgagcccggcaaacttgtgctaactgtgaacaagctagcatccaataagaagaagctccttcacagatcaaaggtgaagagcaccancgagtgagtgtgaagttgctgctagctggctgggtcctacagttcaacgatctaccacagtttatctcagcatgatagaagaaaggaaaaaccttttggcttgggtccgt

SEQ ID NO: 34 - protein, 244 aa, Saccharum officinarum
  UNSURE (243)..(243): Xaa can be any naturally occurring amino acid
MRSGSASSSGASSCWSAASCRSWTFRPAASAPWSRLPTSRTRRPCSASTAPSPARLSRCSRTTTPSSLPRRCSFNVPWWYLAANKMMSPFLTQRTKSKFVFASPAKSAETLFRYIAAEQVPVQFGGLFKEDDPEFTTSDTVAELTIKPSSKETIEIPVTENSTIVWELRVLGWEVSYGAEFTPDAEGGYTVIVQNTRKVPANEEPIMKGSFKVGEPGKLVLTVNKLASNKKKLLHRSKVKSTXE

SEQ ID NO: 35 - DNA, 1404 bp, Saccharum officinarum
  misc_feature (565)..(565): n is a, c, g, or t
  misc_feature (577)..(577): n is a, c, g, or t
ctctctcttgctcctctcctcgccaccgccgccgtgaaatccgcacgcgtgctgcgtcctgccgagttgtgagctgtgattgtgagtgagcgccatggccgtggaggctgtgtctggaaatggcgccgaggcggtggcgccggcgccggcgaaggaggtgaacgccaaggaggcggttgcggtgtccaagaacgcgtcgttcagggaggagagcaacttcctggacgatctcaaggagagcgagcgtaaggcgctcgccgagctccgcgacaaggtcgaggcggccatcgtggagggcaagctgttcgacgacggcggcaagccggaggcgaaggagaaggagcaggccaagaagaaggctgagaagaccgtggagaagaaagaggaggagcccgaagccgaagagaagggagaggaggacggcaagaaggaggccgacgccgaggaggagaaaaaggaaggcgaggaggaaggggagaagaaggacgacgaggagggtggaggagaagacaccaaggacgaggccaagaaagatgaagccggcgagaaggcggcggcgaaggangagaaagaggangagaagccggcggagacggcggccgtcgtcgtcgtcgacaaggacatcgcgctgtggggcgtgcctctgctcccgagcaagggagacgaggccacggacgtggtgctcctcaagttcctccgcgcgcgcgacttcaaggccggcgccgcgttcgagatgctccgccgcacgctccgctggcgcaggggctggaccggcttcagcgttgacgccgacgacgacgacgccgacctccccgaggagctcgcgggcgcgtgctacctcgacggcgcggaccgggagggccacccggtgtgctacaacgcgccgggcgtgttcgcggacgacgccgtgtacaagaaggcgctgggcaccgaggaaggcaaggccaggttcctccggtggcgggtccgcgccatggagcgccacgtggccgagctggacctgaggcccggcggcgccgcgtcgctgctgcaggtgaccgacctgaagaactcgccgggcccggccaagaaggacctccgcgtcgccgtcaagcaggtgctcgacctgttccaggacaactaccccgagctcgtcgcaagaaacatcttaatcaacgtgccgttctggtactacgcgttcagcgccctgttctacccgttcctgacgcagaggaccaagagcaagttcgtcgttgctcgcccgtccaaggtcaccgagaccctcctcaagtacattccgattgaggccatccccgtgaagtacggcggcctgaaacgcgacggcgacaccgagttcttcgcggacgacagcgaagtcacagaaggcaccgtcaaggaaagctccacgcagaccatcgagatcga

SEQ ID NO: 36 - protein, 436 aa, Saccharum officinarum
  UNSURE (157)..(157): Xaa can be any naturally occurring amino acid
  UNSURE (161)..(161): Xaa can be any naturally occurring amino acid
MAVEAVSGNGAEAVAPAPAKEVNAKEAVAVSKNASFREESNFLDDLKESERKALAELRDKVEAAIVEGKLFDDGGKPEAKEKEQAKKKAEKTVEKKEEEPEAEEKGEEDGKKEADAEEEKKEGEEEGEKKDDEEGGGEDTKDEAKKDEAGEKAAAKXEKEXEKPAETAAVVVVDKDIALWGVPLLPSKGDEATDVVLLKFLRARDFKAGAAFEMLRRTLRWRRGWTGFSVDADDDDADLPEELAGACYLDGADREGHPVCYNAPGVFADDAVYKKALGTEEGKARFLRWRVRAMERHVAELDLRPGGAASLLQVTDLKNSPGPAKKDLRVAVKQVLDLFQDNYPELVARNILINVPFWYYAFSALFYPFLTQRTKSKFVVARPSKVTETLLKYIPIEAIPVKYGGLKRDGDTEFFADDSEVTEGTVKESSTQTIEI

SEQ ID NO: 37 - DNA, 1658 bp, Triticum aestivum
ccacgcgtccgctctccccctctccctcctgctctatctttctcaccgcaaaagcttgaaacaccccgcggagatggcagaggagccgcagccacaggccgccgccgcccccgccgccgcggccacggaggtggtcgtcgccgagaaggcgccggcggaggtggagaagaaggccgaggagcccgcggcggaggcggaggccgaggagacggccgccgttgccgacgacgggggcgccgtcgaggccaccggctctttcaaggaggagagcaacctcgtcgccgacctgcctgacccggagaagaaggcgctcgacgagttcaaggagctgatcgtcgccgcgctcgccgccggtgagttcaatctgccccctcccccgccgccgccgaaggccaagactgaggccgccgcagaggagaccaagacggaggcgccggccaaggaggaggccaagaccgaggagccggccaaggcggaagaaccagccaaggaggagcccaaggctgaagagccggccaaggccgaggcggcagcggcggagccagcagccgaggagcccaaggccgtggtcgctgccgaggcagcagccgaggagccggccaaggaggaacccaaggccgaggaggccaagccggccgagccaaagaaggaggaggaagcagtcgtggtcgccgaggagggcaccaagacggcggaaccggtcgaggaggccgccgccgccgccaccaccacagagcaggcagcggcgccggaaccggaggcggaggcagccgcgcccgagccggtgttcatctggggcgtgccgctggtgggcgacgacgagcgcacggacgcggtgctgctcaagttcctgcgcgcgcgggagttcaaggtgaaggaggcgatggcgatgctccggtccgccgtgctgtggcggaagcgcttcggcatcgagtcgctcctggaggccgacctggccttcccggagctggagaaggtggtgttctaccgcggcgccgaccgggagggccacccggtgtgctacaacgtgtacggcgagttccaggacaaggaggtgtacgagaaggcgttcggcgacgaggagaagcgggagcggttcctcaagtggcgcatccagctgctggagcgcggcatcctgtcgcagctggacttcgcgcccagcggcatctgctccatggtgcaggtcaccgacctcaagaactcgccgcccatgctcggcaagcaccgcgccgtcacccgccaggccgtcgccctgctccaggacaactaccccgagttcatcgccaagaaggtgttcatcaacgtgccatggtggtatctcgctgccaacaaaatgatgagccctttcctcacccagcgcaccaagagcaagttcgtgttcgccagccaggccaagtcacccgagaccctcttcagatacattgcgccggagcaagttcccgtccaatttggaggcctcttcaaggaagatgaccctgatttcaccacctccgactctgtcaccgagctcaccatcaaagcttcatccaaagaaaccattgagatccctgtcaccgagaactcaacgattgtatgggagctccgggtgctcggctgggaggtcagccacggcgcggagttcaccccggacgccgagggggcgtacaccgtcatcgtgc

SEQ ID NO: 38 - protein, 528 aa, Triticum aestivum
MAEEPQPQAAAAPAAAATEVVVAEKAPAEVEKKAEEPAAEAEAEETAAVADDGGAVEATGSFKEESNLVADLPDPEKKALDEFKELIVAALAAGEFNLPPPPPPPKAKTEAAAEETKTEAPAKEEAKTEEPAKAEEPAKEEPKAEEPAKAEAAAAEPAAEEPKAVVAAEAAAEEPAKEEPKAEEAKPAEPKKEEEAVVVAEEGTKTAEPVEEAAAAATTTEQAAAPEPEAEAAAPEPVFIWGVPLVGDDERTDAVLLKFLRAREFKVKEAMAMLRSAVLWRKRFGIESLLEADLAFPELEKVVFYRGADREGHPVCYNVYGEFQDKEVYEKAFGDEEKRERFLKWRIQLLERGILSQLDFAPSGICSMVQVTDLKNSPPMLGKHRAVTRQAVALLQDNYPEFIAKKVFINVPWWYLAANKMMSPFLTQRTKSKFVFASQAKSPETLFRYIAPEQVPVQFGGLFKEDDPDFTTSDSVTELTIKASSKETIEIPVTENSTIVWELRVLGWEVSHGAEFTPDAEGAYTVIV

SEQ ID NO: 39 - DNA, 1722 bp, Arabdidopsis thaliana
atggctcaagaggaagtacagaaatcggctgatgtcgctgctgctccggtggtgaaggagaaacctattaccgataaggaggttactattcctacccctgtggcagagaaagaggaagttgctgctcctgtctctgatgagaaggcggttccagagaaggaggtgactccggagaaggaagccccagcggcggaagcggagaaatctgtttcggtgaaggaggaagagacggttgttgtagctgagaaggttgttgttttaactgctgaggaagttcagaagaaggcacttgaggagtttaaggagcttgtaagggaggctttgaacaaacgtgaattcactgctccggtgacgccggttaaggaagagaaaacagaggagaagaaaacagaggaggaaactaaagaggaagagaaaacagaggagaagaaagaagagacaacgactgaggttaaggttgaagaagagaaaccggcggttccagcggcggaggaggagaaatcatcagaggctgctccggttgagaccaaatctgaggagaaacctgaagagaaagcagaggtaacaaccgagaaagcatccagtgccgaagaagatggaaccaagaccgtggaagcaatcgaagaatctatcgtctctgtttcaccacctgaatccgccgtagcacctgtcgtggtagagactgtcgccgttgctgaggcagagccagtggagccggaagaagtctcgatctggggagttccactactccaagacgagagatctgacgtgatcctcacgaaattcctccgtgcaagagactttaaggtcaaagaagctttaaccatgcttaaaaacaccgtccagtggcgtaaagaaaacaaaatcgacgaactcgttgaatccggagaagaagtgagtgagttcgagaagatggtgtttgctcacggtgttgacaaagaaggacacgtcgtgatctacagttcttacggtgagtttcagaacaaggagcttttctccgacaaggagaagcttaacaagttcctcagctggaggattcagctacaagagaagtgtgtgagagctattgatttcagcaaccctgaagcgaagtcttcgtttgtgttcgtcagcgacttcaggaacgctccaggacttggtaaaagagccttgtggcaattcatcagacgcgctgttaaacaattcgaggacaattatcctgaattcgccgctaaagagctattcatcaatgtcccatggtggtacattccatactacaaaacattcggatctatcatcacatccccaaggactaggagcaagatggtccttgctggtccatccaaatctgccgatactattttcaaatacatagctcctgaacaagttcccgttaaatacggtggacttagcaaagatactcctttgaccgaagaaaccataacggaagccatcgttaaaccggcagcaaactacactattgaattgcctgcttctgaggcttgcacgctttcatgggagcttagggttttgggtgctgatgtgagctacggagctcagtttgagccaaccaccgaaggaagctatgctgtgatcgtctctaagacacggaagattggatcaaccgatgaaccggtgataaccgattcttttaaggtgggtgaaccgggaaagattgtgatcacaatcgacaaccagacttccaagaagaagaaagtgctctacaggttcaaaactcaataa

SEQ ID NO: 40 - protein, 573 aa, Arabdidopsis thaliana
MAQEEVQKSADVAAAPVVKEKPITDKEVTIPTPVAEKEEVAAPVSDEKAVPEKEVTPEKEAPAAEAEKSVSVKEEETVVVAEKVVVLTAEEVQKKALEEFKELVREALNKREFTAPVTPVKEEKTEEKKTEEETKEEEKTEEKKEETTTEVKVEEEKPAVPAAEEEKSSEAAPVETKSEEKPEEKAEVTTEKASSAEEDGTKTVEAIEESIVSVSPPESAVAPVVVETVAVAEAEPVEPEEVSIWGVPLLQDERSDVILTKFLRARDFKVKEALTMLKNTVQWRKENKIDELVESGEEVSEFEKMVFAHGVDKEGHVVIYSSYGEFQNKELFSDKEKLNKFLSWRIQLQEKCVRAIDFSNPEAKSSFVFVSDFRNAPGLGKRALWQFIRRAVKQFEDNYPEFAAKELFINVPWWYIPYYKTFGSIITSPRTRSKMVLAGPSKSADTIFKYIAPEQVPVKYGGLSKDTPLTEETITEAIVKPAANYTIELPASEACTLSWELRVLGADVSYGAQFEPTTEGSYAVIVSKTRKIGSTDEPVITDSFKVGEPGKIVITIDNQTSKKKKVLYRFKTQ

SEQ ID NO: 41 - DNA, 1473 bp, Arabdidopsis thaliana
atggctgaagaacctactactaccactctcgttacaccggaaaagctaccttctccgagcctcacgccttctgaagtatctgaatctactcaagatgccctaccgacagagacagaaactctggagaaagtgactgagactaatccaccggaaactgcagataccaccaccaagccagaagaagaaaccgcggcagagcatcatccaccgacagtgacggaaacagaaactgcatcgacggagaaacaagaggttaaagacgaagcatcgcagaaagaagtagctgaagagaaaaagagtatgattccacagaatcttggttcattcaaagaagaaagcagcaaactttctgatctatctaattccgagaagaaatcactcgatgaactaaaacatctagttcgagaagctctagacaatcaccaattcaccaacacaccagaagaagtcaagatttgggggattccattacttgaagacgatagaagcgacgtcgttttgttaaaattcctaagagctagggagttcaaggtgaaagattcgtttgctatgctcaagaacacaatcaagtggagaaaggagttcaagatcgatgaattggtcgaggaagatcttgtggatgatcttgacaaggttgtgtttatgcatggacatgaccgagaaggtcaccctgtttgttacaatgtctatggtgagtttcagaacaaggagctttataataagacgttttctgatgaggaaaagaggaaacatttcttgaggactaggattcagttcttggagaggagtataaggaagctagattttagctctggtggggtttctactatttttcaggttaatgatatgaagaattctccggggttagggaagaaagagcttagatcagctactaagcaagctgttgagttgcttcaggacaattaccctgagtttgtcttcaaacaggcttttatcaatgttccttggtggtaccttgtgttttatactgtgattggtccgttcatgacaccaagatcaaagagcaagcttgtgtttgctggtccttcgcgttcagctgaaaccctattcaaatacatatcacccgagcaagttccagtacaatatggtggattgagtgttgatccttgcgactgcaatccagacttttcgttggaagattcagcctctgagatcactgttaagcccggaacaaaacaaactgttgagatcataatctatgagaaatgtgaacttgtgtgggagataagggtaactggatgggaagtgagctacaaggctgaatttgtgccggaagagaaagatgcttacacggtggttatacaaaaaccgaggaagatgagaccatccgatgaaccggtgttaacccatagcttcaaagtgaatgagcttggcaaggttttactcacagtagacaacccaacctctaagaagaagaagctcgtttacaggttcaatgtcaaacctctctaa

SEQ ID NO: 42 - protein, 490 aa, Arabdidopsis thaliana
MAEEPTTTTLVTPEKLPSPSLTPSEVSESTQDALPTETETLEKVTETNPPETADTTTKPEEETAAEHHPPTVTETETASTEKQEVKDEASQKEVAEEKKSMIPQNLGSFKEESSKLSDLSNSEKKSLDELKHLVREALDNHQFTNTPEEVKIWGIPLLEDDRSDVVLLKFLRAREFKVKDSFAMLKNTIKWRKEFKIDELVEEDLVDDLDKVVFMHGHDREGHPVCYNVYGEFQNKELYNKTFSDEEKRKHFLRTRIQFLERSIRKLDFSSGGVSTIFQVNDMKNSPGLGKKELRSATKQAVELLQDNYPEFVFKQAFINVPWWYLVFYTVIGPFMTPRSKSKLVFAGPSRSAETLFKYISPEQVPVQYGGLSVDPCDCNPDFSLEDSASEITVKPGTKQTVEIIIYEKCELVWEIRVTGWEVSYKAEFVPEEKDAYTVVIQKPRKMRPSDEPVLTHSFKVNELGKVLLTVDNPTSKKKKLVYRFNVKPL

SEQ ID NO: 43 - DNA, 2052 bp, Arabdidopsis thaliana
atggctcaagaagagatacagaaacctactgcctctgttccagtggttaaggaggaaactcctgccccggttaaggaggttgaggtgccggttactacggagaaagctgtggctgcgcctgctccggaagctacggaggagaaagttgtgtctgaggtggcggtgcctgaaacagaggtgacggcggtgaaagaggaggaggttgcgacgggaaaggagatcttgcaatcggagtcgtttaaggaggaaggctatttggcttctgaattacaggaagctgagaagaatgctttggctgagttaaaggagttggttagggaggctttgaacaagcgtgaattcaccgcgccaccgccaccaccagctccggtaaaggaagagaaagttgaggagaagaaaacagaggaaacagaggaaaagaaggaagaagttaaaacagaggaaaaatctcttgaggctgaaaccaaagaagaggagaaatctgctgctccggccaccgtagagaccaagaaagaagagatcttggccgctccggctccgatcgtcgcagagaccaagaaggaagagacaccagttgctcctgctccggtagagactaaaccggctgctccggtcgttgcagagacaaagaaggaagaaatattaccagctgctccggtcaccacagagaccaaggtggaagagaaagtcgttccagtagaaaccacaccggctgctccagtcaccacagagaccaaggaagaagagaaagccgctccggtcaccacagagaccaaggaggaagagaaagcagctccgggagagaccaagaaagaagagaaagcaaccgcctctactcaggtcaagagggcctcaaaatttattaaagatatatttgtctcagtcaccactagcgagaagaagaaggaagaagagaaaccagcagtagtaacaatcgagaaggctttcgcagctgatcaagaagaagaaacaaaaaccgttgaagcagtcgaagaatcaatcgtctccatcactcttccagagacagctgcatacgtagagccagaagaagtctcaatctggggaatcccacttctagaggacgaaagatccgacgtgatcctcctcaaattcctccgtgcacgtgacttcaaggtcaaagaagccttcacgatgctgaaaaacaccgtccaatggcgcaaagagaacaagatcgacgacctagtctcagaagatcttgaaggaagcgagtttgagaagttggtgttcactcacggtgtcgacaaacaaggacatgtcgtgatctatagctcgtacggtgagtttcagaacaaggagattttctcagataaagagaagcttagcaagtttctcaaatggaggattcagttccaagagaagtgtgtgaggtctcttgactttagccctgaggctaagtcatcgttcgtgttcgttagtgacttcaggaacgctcctggacttggtcagagagcattgtggcagttcattaaacgcgccgttaagcaattcgaagataactatccagagtttgtcgctaaagagctgttcattaatgtcccatggtggtacattccttactacaaaacattcggaagtatcattacatcgccaaggacaaggagcaagatggtcctttctggtccatccaaatccgctgagaccattttcaaatacgtagctcctgaagtagtcccggttaagtatggtggactcagcaaagatagtccattcaccgttgaagatggagtcaccgaggccgtagttaaatcgacatctaaatataccattgatttgcctgctacagagggttccacgctctcatgggagcttagggttttgggtgcggacgtgagctacggagctcaatttgagccaagcaatgaggcaagctacaccgtgattgtctctaagaaccggaaggtcggtttaactgatgaaccggtgataaccgattctttcaaggcaagtgaggcgggaaaggtcgtgatcacgattgacaaccaaacctttaagaagaagaaggtgctctacaggtccaaaacccaagcataa

SEQ ID NO: 44 - protein, 683 aa, Arabdidopsis thaliana
MAQEEIQKPTASVPVVKEETPAPVKEVEVPVTTEKAVAAPAPEATEEKVVSEVAVPETEVTAVKEEEVATGKEILQSESFKEEGYLASELQEAEKNALAELKELVREALNKREFTAPPPPPAPVKEEKVEEKKTEETEEKKEEVKTEEKSLEAETKEEEKSAAPATVETKKEEILAAPAPIVAETKKEETPVAPAPVETKPAAPVVAETKKEEILPAAPVTTETKVEEKVVPVETTPAAPVTTETKEEEKAAPVTTETKEEEKAAPGETKKEEKATASTQVKRASKFIKDIFVSVTTSEKKKEEEKPAVVTIEKAFAADQEEETKTVEAVEESIVSITLPETAAYVEPEEVSIWGIPLLEDERSDVILLKFLRARDFKVKEAFTMLKNTVQWRKENKIDDLVSEDLEGSEFEKLVFTHGVDKQGHVVIYSSYGEFQNKEIFSDKEKLSKFLKWRIQFQEKCVRSLDFSPEAKSSFVFVSDFRNAPGLGQRALWQFIKRAVKQFEDNYPEFVAKELFINVPWWYIPYYKTFGSIITSPRTRSKMVLSGPSKSAETIFKYVAPEVVPVKYGGLSKDSPFTVEDGVTEAVVKSTSKYTIDLPATEGSTLSWELRVLGADVSYGAQFEPSNEASYTVIVSKNRKVGLTDEPVITDSFKASEAGKVVITIDNQTFKKKKVLYRSKTQA

SEQ ID NO: 45 - DNA, 1230 bp, Arabdidopsis thaliana
atggatgcttcattgtctccattcgatcaccaaaaaactcaaaacacagagccaaagaaaagcttcattacctcactaatcactctccgttcaaacaacatcaaagaagacacatacttcgtctcagaactcaaacccacggagcaaaaatcacttcaagaactcaaagaaaagctctcagcttcatcctccaaagcttcttcaatgtggggagtctcactcctcggtggagacgacaaagctgacgtaatcctcctcaagttcctcagagcaagagatttcaaagtagcagactctttgagaatgcttgagaagtgtttggagtggagagaagagttcaaagcagagaaattgacagaagaagatctgggttttaaagatttggaaggtaaagttgcttacatgagaggctacgacaaagaaggacacccagtttgttacaatgcttatggtgtgtttaaagagaaagagatgtatgagagagtgtttggtgatgaagagaagcttaacaagtttctgagatggagagttcaggttttggagagaggtgttaaaatgcttcattttaaacctggtggtgttaattccattattcaagttacagatcttaaagatatgcctaagagagagcttagagttgcttctaatcagatcctctctctttttcaagataattaccctgaattggttgctactaagatattcataaacgtgccttggtacttcagtgtgatctactcaatgttcagcccattcctgactcagagaacaaagagcaagtttgtgatgtccaaagaaggcaatgcagcagaaacactctacaagttcattaggccagaagatattccggtgcaatacggtggtcttagccgtcctactgattcgcaaaacggaccgccaaaaccggcgtctgaattctccatcaagggtggtgagaaagttaacattcagattgaaggcattgagggtggagcaaccataacatgggatatagtagttggaggatgggatttagagtacagtgcagagtttgttccaaacgctgaagagagttacgcgatcgttgtcgagaaaccgaagaagatgaaagctacagatgaagctgtttgcaactctttcactacagtagaagctgggaagctcattctctctgttgacaatactctctctcgcaagaagaaagttgctgcttaccgttacactgtccggaaatctactacaaccgtctaa

SEQ ID NO: 46 - protein, 409 aa, Arabdidopsis thaliana
MDASLSPFDHQKTQNTEPKKSFITSLITLRSNNIKEDTYFVSELKPTEQKSLQELKEKLSASSSKASSMWGVSLLGGDDKADVILLKFLRARDFKVADSLRMLEKCLEWREEFKAEKLTEEDLGFKDLEGKVAYMRGYDKEGHPVCYNAYGVFKEKEMYERVFGDEEKLNKFLRWRVQVLERGVKMLHFKPGGVNSIIQVTDLKDMPKRELRVASNQILSLFQDNYPELVATKIFINVPWYFSVIYSMFSPFLTQRTKSKFVMSKEGNAAETLYKFIRPEDIPVQYGGLSRPTDSQNGPPKPASEFSIKGGEKVNIQIEGIEGGATITWDIVVGGWDLEYSAEFVPNAEESYAIVVEKPKKMKATDEAVCNSFTTVEAGKLILSVDNTLSRKKKVAAYRYTVRKSTTTV

SEQ ID NO: 47 - DNA, 1623 bp, Arabdidopsis thaliana
atgactgctgaagttaaggttgaggagaaacaggtggagtcagaggttgttattgctcctgctgttgttcctgaggagactactgttaaggctgttgtggaagagactaaggttgaagaagatgagagcaagcctgagggtgtggagaagagtgcttccttcaaagaagagagtgatttctttgctgatttgaaagaatctgagaaaaaggcactgagtgatctcaagtctaagcttgaggaagctattgttgacaacactctcttaaagacgaagaagaaggagagctctcctatgaaggagaagaaggaagaggttgtgaaacctgaagctgaggttgagaagaagaaggaagaagcagcagaggagaaggttgaagaagagaagaaatctgaggctgttgttaccgaagaagcaccgaaagctgagactgttgaggctgttgttacagaggagataatccccaaggaagaagtgactactgttgttgagaaggtagaagaagaaaccaaggaagaagagaagaaaaccgaggatgttgttactgaagaagtgaaagctgagactattgaggtggaggatgaagatgagtcggtggataaggatatcgagctttggggagtgccattgcttccaagcaaaggagctgaaagcacggatgttatcctcttgaagttcttgagagcaagagactttaaagtcaacgaagcctttgagatgctgaagaaaaccctcaaatggagaaagcaaaacaagattgattcgatccttggagaggagtttggggaggatcttgccactgcagcttacatgaacggtgtggaccgcgagtcccacccagtttgttacaatgtccacagcgaggagctttaccagacgattgggtcggagaagaacagagagaagttcttgagatggaggtttcagctgatggagaagggaatccagaagcttaatcttaaaccaggaggtgttacttctcttctccagatccacgatctcaaaaacgctcctggagtgtcaagaacagagatttgggtcggaatcaagaaagtaatcgagactttgcaggacaactatccggaattcgtgtccagaaacatattcatcaacgttccattctggttctacgccatgagagctgtcctctcgccattcttaactcaacgaaccaagagcaagtttgttgtggctcgtcccgctaaggtcagagagactcttctcaagtacattccagctgatgagctcccagttcagtacggtgggttcaaaacagtagacgataccgaattctccaacgaaactgtctctgaagttgttgttaagcctggatcatctgaaaccatcgaaatcccagctcctgagactgaaggtacattggtatgggacatagcggttttgggatgggaagtgaattacaaggaagagtttgtgccaacagaagaaggagcttacacggtaatagtccaaaaggtgaagaagatgggagcaaatgaaggaccaatcaggaacagtttcaagaacagtcaggctggtaagattgttcttaccgttgacaatgtctctggcaagaagaagaaagttctgtacaggtacagaaccaagactgaatcctcttcctga

SEQ ID NO: 48 - protein, 540 aa, Arabdidopsis thaliana
MTAEVKVEEKQVESEVVIAPAVVPEETTVKAVVEETKVEEDESKPEGVEKSASFKEESDFFADLKESEKKALSDLKSKLEEAIVDNTLLKTKKKESSPMKEKKEEVVKPEAEVEKKKEEAAEEKVEEEKKSEAVVTEEAPKAETVEAVVTEEIIPKEEVTTVVEKVEEETKEEEKKTEDVVTEEVKAETIEVEDEDESVDKDIELWGVPLLPSKGAESTDVILLKFLRARDFKVNEAFEMLKKTLKWRKQNKIDSILGEEFGEDLATAAYMNGVDRESHPVCYNVHSEELYQTIGSEKNREKFLRWRFQLMEKGIQKLNLKPGGVTSLLQIHDLKNAPGVSRTEIWVGIKKVIETLQDNYPEFVSRNIFINVPFWFYAMRAVLSPFLTQRTKSKFVVARPAKVRETLLKYIPADELPVQYGGFKTVDDTEFSNETVSEVVVKPGSSETIEIPAPETEGTLVWDIAVLGWEVNYKEEFVPTEEGAYTVIVQKVKKMGANEGPIRNSFKNSQAGKIVLTVDNVSGKKKKVLYRYRTKTESSS

SEQ ID NO: 49 - DNA, 2007 bp, Arabdidopsis thaliana
atgtctcaagattctgcaactactactccgccgccacctttaacctccgacgtttcaatgccttccggtgaagaagatgagccaaagcatgtaacatcggaagaagaggcaccggtgacttcggagacaaatctgaagctacctttgatgccggagctagaggagtcaaatcatacggcggaggttgtttcagagaaggtgacgccggagacgatgactttggagtcagaaggtctcaaccacgcggcggaggattcagagcagacacatgaagtgacgccggagacagagactgcgaagctagaggttctcaaccacacggcggaggattcagagcagacacatgaagtgacgccggagaaagagactgtgaaatcagagtttctcaaccacgtggcggaggattcagagcagacacatgaagtgacgccggagacagagactgtgaagtcagaggttctcaaccatgcggcggaggattcagagcagccacgtggagtgacaccgacgccggagacagaaacatcggaggcagacacgtcattgcttgtaacttccgagacagaagagcctaaccatgcggcggaggattattcagagacagagccatcacagaaactaatgttggagcagaggagaaagtacatggaagtagaagattggacagagccagaactaccagatgaagcggtgttagaagctgcagcgtcagtccctgagccaaagcaaccagagcctcagacaccaccaccaccaccatctactactacttccactgttgcatctagatctttagccgaaatgatgaacagagaagaagcagaagtagaagagaaacaaaagattcagattcctcgtagtctcggttcattcaaagaagaaacaaacaaaatctccgatctttcagaaacagagttaaacgcacttcaagagcttcgtcaccttcttcaagtatcacaagattcaagcaaaacctctatatggggtgtgccacttctcaaagacgacagaaccgacgtcgttttgttaaagtttctaagagcaagagactttaaacctcaagaagcttactcaatgctaaacaagacactccaatggagaatcgacttcaacatcgaagagcttctagacgaaaacctcggtgacgatttagacaaagttgtgttcatgcaaggacaagacaaggagaatcatcctgtctgttacaatgtctacggtgagtttcagaacaaagatctttatcagaaaacgttttcagatgaagagaagagagaacggttcttgagatggaggattcagtttcttgaaaagagtatcaggaatcttgattttgtagctggtggtgtttccacgatatgtcaagtaaatgatcttaagaattctccaggacctggtaagactgagcttaggttagctactaagcaagctcttcatcttcttcaagacaattaccctgagtttgtctctaaacagatattcatcaatgttccatggtggtaccttgcgttctatagaattattagtccttttatgtcacaaaggtcaaagagcaaactagttttcgcaggtccttcaagatctgcagaaacccttctcaagtacatatcacccgaacatgtcccggttcagtatggtggactaagtgtggataattgcgagtgtaactcggatttcacacacgatgatatcgctaccgagattactgttaaaccaactactaaacaaaccgtcgagattattgtttacgagaaatgtacaatcgtgtgggagataagagtagtgggatgggaggtttcgtatggagcggagtttgtgccggagaacaaagaagggtatacagtgatcattcagaaaccgaggaagatgactgcgaaaaatgaactggtggtgtctcatagcttcaaagttggagaagttggcaggattttgctaactgttgataacccgacttcgaccaagaaaatgcttatctacaggttcaaggttaagcctttagcttgtgagtaa

SEQ ID NO: 50 - protein, 668 aa, Arabdidopsis thaliana
MSQDSATTTPPPPLTSDVSMPSGEEDEPKHVTSEEEAPVTSETNLKLPLMPELEESNHTAEVVSEKVTPETMTLESEGLNHAAEDSEQTHEVTPETETAKLEVLNHTAEDSEQTHEVTPEKETVKSEFLNHVAEDSEQTHEVTPETETVKSEVLNHAAEDSEQPRGVTPTPETETSEADTSLLVTSETEEPNHAAEDYSETEPSQKLMLEQRRKYMEVEDWTEPELPDEAVLEAAASVPEPKQPEPQTPPPPPSTTTSTVASRSLAEMMNREEAEVEEKQKIQIPRSLGSFKEETNKISDLSETELNALQELRHLLQVSQDSSKTSIWGVPLLKDDRTDVVLLKFLRARDFKPQEAYSMLNKTLQWRIDFNIEELLDENLGDDLDKVVFMQGQDKENHPVCYNVYGEFQNKDLYQKTFSDEEKRERFLRWRIQFLEKSIRNLDFVAGGVSTICQVNDLKNSPGPGKTELRLATKQALHLLQDNYPEFVSKQIFINVPWWYLAFYRIISPFMSQRSKSKLVFAGPSRSAETLLKYISPEHVPVQYGGLSVDNCECNSDFTHDDIATEITVKPTTKQTVEIIVYEKCTIVWEIRVVGWEVSYGAEFVPENKEGYTVIIQKPRKMTAKNELVVSHSFKVGEVGRILLTVDNPTSTKKMLIYRFKVKPLACE

SEQ ID NO: 51 - DNA, 1542 bp, Populus trichocarpa
gactcagtactaacatctgaatctgatgttagtactgagattaaaccaccagcagagactcaggaatcaaaagttgaagaaaccccagaaaaagaatcacaagaagtggcaaaagaagagcaaaaggctgcaccttcaccagaggagatcactatatgggggatccctcttctgaaagatgatagaagtgatgtggttctcttgaagttcttgagggcaagggattttaaggtaagcgatgcatttgtaatgatcaagaacacaattcaatggaggagagactttaaaattgatgagcttgttgatgaagatctaggtgatgatttggagaaagttgtgtttatgcatggttatgacagggaagggcatcctgtgtgttataatgtgtatggggagtttcaaaataaagagttgtatcagaagacattctctgatgaggagaaaagattgaagtttttgaggtggcggattcagttcttggagaggagtattaggaagcttgattttagtcctagtggtatttccaccgtcttccaggttaatgatctcaagaactctccaggacccggaaagagagagcttaggttggctactaaacaggctctcctattgcttcaggacaattaccctgagtttgtggccaaacaggtgttcatcaatgtcccttggtggtatcttgcattttatacaatgatcagtccatttatgacacaaagaaccaaaagcaaatttgtattcgcaggcccatcaaaatctgctgagacacttttcaaatatgtatctcctgagcaagttcctattcagtatggtggcttgagcgtggatttctgcgactgcaaccccgaatttacttttgctgatcctgctactgagataactgtaaaaccagcaaccaagcaaactgtggaaattataatttatgagaaatgtttcattgtttgggagttgcgagttgttggatgggaggtgagttatagtgctgaattcgtgcccgattctaaagatgcatacacaattataatgacaaaacccacaaaaatgaccccaaccaatgagccagtggtgtctaacagcttcaaagttggtgagctgggaaaaatattgctcacagttgacaactctacctcaaagaagaagaaacttctctacaggttcaagataaaccccttctcagattgaggaactctttgtatttaatgtttccatctcagatagttgtggaaattgaattaattttatgtactctgggtgagccttttgtctctcgtcttttttctctaccgaatagcacatggtttgcattcggtgttttttttgccaatcatcttggggaaaacaaacagatgtgtgggcatatggaggggggtgtggttgtgaaacttatatatacataaatgtgccatttcattgaggcgttttgcgatgcgctttctcgtttatctggatgtcaatatttcagtaccatttacctttatgtaatctcaaaactcttatgttattgcgacatcgaatacttcaatttgacatcatctttaaagttga

SEQ ID NO: 52 - protein, 309 aa, Populus trichocarpa
MIKNTIQWRRDFKIDELVDEDLGDDLEKVVFMHGYDREGHPVCYNVYGEFQNKELYQKTFSDEEKRLKFLRWRIQFLERSIRKLDFSPSGISTVFQVNDLKNSPGPGKRELRLATKQALLLLQDNYPEFVAKQVFINVPWWYLAFYTMISPFMTQRTKSKFVFAGPSKSAETLFKYVSPEQVPIQYGGLSVDFCDCNPEFTFADPATEITVKPATKQTVEIIIYEKCFIVWELRVVGWEVSYSAEFVPDSKDAYTIIMTKPTKMTPTNEPVVSNSFKVGELGKILLTVDNSTSKKKKLLYRFKINPFSD

SEQ ID NO: 53 - DNA, 1080 bp, Populus trichocarpa
gggaggattcaattcctggaaaaaagtatcaggacattggatttcagtcccggtggaatttccacaattgttcaggttaatgacttgaaaaattctcctggaccagctaagagagagcttagacaagctactagacaggcacttcaattgcttcaagacaactatccagaatttgtggccaaacagatcttcatcaatgttccctggtggtacctaacagtaaatagaatgataagtccatttttaacccagaggaccagaagcaagtttgtctttgttggtccttccaaatctgccgaaacccttatcaggtacatagccgctgagcaaataccagtgaagtacggaggactaagcaaagatggtgaatttggctcagctgatgttgttactgagattaccgtgaagccagcagcaaagcacactgtagaattcccagttactgagacatgccttttaacatgggaagtgagagttgcgggatgggatgtgagctatagtgcagaatttgtaccaagtgctgaagatagctacacagtgatcatccaaaaggctagaaaggttgctgcaactgaagaaccagtggtttgcaacagtttcaaaattggtgaacctggtaaagttgttctcaccattgacaactccacatccaagaagaagaagaagctcctctatcgcttgaaaaccaagcccgcttcttctgattaattaagggactatatatattgaaacaacaatagaagattttgcttacattcttgctgctgctgctgctgccaattttatcaacatgatcatatcacagcttgaaggtgttctgagggtcttgatcatggagaagataaagaaatcttgaagatgtttatttatatgtttatttataattgaattttgttttggtgtggaatggattaaggatgttgtgcaattgaaggctagaagcatgtatggggatagggaagaagctccattactagtgccaagaattttctttgtaaattctttatggctttctttctctttccctgtaagtatcttttggacatattatgatattaatgaagacagtatctttcctat

SEQ ID NO: 54 - protein, 159 aa, Populus trichocarpa
MISPFLTQRTRSKFVFVGPSKSAETLIRYIAAEQIPVKYGGLSKDGEFGSADVVTEITVKPAAKHTVEFPVTETCLLTWEVRVAGWDVSYSAEFVPSAEDSYTVIIQKARKVAATEEPVVCNSFKIGEPGKVVLTIDNSTSKKKKKLLYRLKTKPASSD

SEQ ID NO: 55 - DNA, 911 bp, Populus trichocarpa
atgtgttcatcaatgttccatggtggtacctaacattcaataagatgatcagccctttcctgacacacaggacaaagagcaagtttgtttttgctggcccatccaagtctgctgaaacacttttcaaatacatagctcctgaagaagtgccagttcaatatggtggactaagcaaggatggcgaattcacaggtgccgataccgtcacagatgttactattaagccaacatcaaagcacactgttgagttcccagtgtctgaggcatgtgttctcgtttgggagcttcgagtttttggttgggatgtgagctatggagctgaattcgtgcctagcgctgaggatggttacaccgttatcgtatcaaagaccaggaagattatctcatccgatgatcctgtgatctcagacacattcaaaattggtgaacctggcaaggttgtgcttaccattgataaccaaacctctaagaagaagaagctcctctataggtcaaagaccaaacccctttctgaatgagcttcaagaatcaatgccttcgtggggttttgaacttccattaatttagaagacatggatggcataacaaggggtccttggtcatgatgcatgaacacgaggtgtggagttttgttctgtttaaatttaatatattttttgttttataaagtctgggtttgggctgggatttgttgtttggtgtttaattggatacaatgtactggtgaagacagtctgggattatcatggattgacagacacatttgaggtttaagtgtgaagaatatgaaaatgtgtttgccaaagttgaaagactatccttttttgttcttggtactcttacctgtaaaatttgtgtaaatgtgatggtgttctacttcttccttcttaattaatacatgtattttttac

SEQ ID NO: 56 - protein, 157 aa, Populus trichocarpa
MISPFLTHRTKSKFVFAGPSKSAETLFKYIAPEEVPVQYGGLSKDGEFTGADTVTDVTIKPTSKHTVEFPVSEACVLVWELRVFGWDVSYGAEFVPSAEDGYTVIVSKTRKIISSDDPVISDTFKIGEPGKVVLTIDNQTSKKKKLLYRSKTKPLSE

SEQ ID NO: 57 - DNA, 840 bp, Populus trichocarpa
actagtttaattaaattaatccccccccccgtggtattgcttctttgcttcaaatcagtgatctcaagaattctccttccccatcaaagaaagagctcaggactgccatgagcaaagctgtcacccttttgcaggacaattatccagaatttgttgcaaaaaatatattcataaatgttccattttggtattatgctttcaacgccctgctatctcctttcttggctcaaagaaccaagagcaaatttgtcgttgttcgccctgccaagaccaccgagacattgctcaagtatgttcaggccgaggaaatccctgtccaatatggtggcttcaagagggagaatgatttcgagttctccagcgaagatggtgaagtttcagaacttgtaatcaaagctggatcaactgaaaccattgagatccctgcagcagaggttggagccacattgctttgggacctgacagttgtgggatgggaagtgaattacaaggaggaatttgtgccaagtgatgaagcttcctacaccatcatcatccaaaagggcaagaaaatgagctcaaatgaagagccaactcgcaacactttcaggaacaatgaacctggaaaggtagttctgaccattcagaattggtcaagcaagaagaagagggtcctataccgatacaagaccaagaagaatgcttcctattgagacaagactccattcttttatattatcagtcttttatttgccgtgacaattcttttctagatagaaaacattgattcttttcaggattgatatctatatctatatctgatcgtgtgatttgatttgttatttctggggttcctttttc

SEQ ID NO: 58 - protein, 194 aa, Populus trichocarpa
MSKAVTLLQDNYPEFVAKNIFINVPFWYYAFNALLSPFLAQRTKSKFVVVRPAKTTETLLKYVQAEEIPVQYGGFKRENDFEFSSEDGEVSELVIKAGSTETIEIPAAEVGATLLWDLTVVGWEVNYKEEFVPSDEASYTIIIQKGKKMSSNEEPTRNTFRNNEPGKVVLTIQNWSSKKKRVLYRYKTKKNASY

SEQ ID NO: 59 - DNA, 1564 bp, Lycopersicum esculentum
ggagaaagtaactccaccggaaactgaagcaactccggcgccggcagcagagacaccatctgagccatcggagacagagaaggtggaggcagtcgaggaaatcaaggaaaccattgttgaagtaccggctgcggttgctgtgatggcctccacggaggagccaccggctgcagaggcagaggaaccgaaaacagagcaaaccccaccagcagcaccagaagaagtatccatatggggaataccccttttagcagatgagagaagtgatgtaatccttctcaagtttctgcgagcgagagatttcaaggtgaaagaagctttcaccatgttgaaaagtgttgtcgcatggagaaaagaattcaagattgatgaactcttggatgagaaagaattaggacaaggacttgaaaaagttgtttacaatcacggagtagacaaagaaggtcaccctgtatgttacaatgcatttggtgagttccaagacaaagaattgtaccaaaacacttttgctgatgacaaagagaaactcaccaaattcctcagatggagaattcaattcatggagaaatccatcaggaatcttgattttagccctgatggtatcaacacttttgttcaagttcttgatctgaagaattcacctggactcttcttttacaagaaagaacttcgccaagccaccaatcgtgcccttctattactccaggataattaccctgaatttgttgccaagcaggtgttcatcaatgttccatggtggtacccagcttactacaggatgattaatgcatctttcactacaaggaccaagagcaagtttgtttttgctggtccttcaagatctgctgatactctattcaaatacatagcacctgaacaagtaccagcacaatatggtggacttagcaaggagggtgaagaggaattcaccactgctgaaccagccactgaggaaatcattaagccagcttctaaacacaccattgaattcccagttactgagaaaagcacattggtttgggaagcaagagtgacagggtgggatgtatcatatggagctgaatttgtgcctagtgctgaaggtggctacaccattctcatagagaaatcaagaaaagttggggcaaatgaatcagtgatcagcactagctacaaggcaagtgaagcaggcaaagtggtaatcacaattgacaaccaaacttctaaaaagaagaaacttgtttacaggtccaagaacaagatctcagattgctgagccgccttttcttgtttcatagatttttcttttggttgatatcaactagtactattattttgagctttttgggggtatttatttatattttattggggttattttttgagctattttgctgttggattgttttttttattatatggggaatatttattatattacaaaggggttgagatgtggagtacaagttattgatacattttcttctgaaatattttgtgtaaatctaatgctgcctctcattttccttacatttttttggtgatgtgaagcttaacgttagttaatcctatacttatgtttcct

SEQ ID NO: 60 - protein, 370 aa, Lycopersicum esculentum
MASTEEPPAAEAEEPKTEQTPPAAPEEVSIWGIPLLADERSDVILLKFLRARDFKVKEAFTMLKSVVAWRKEFKIDELLDEKELGQGLEKVVYNHGVDKEGHPVCYNAFGEFQDKELYQNTFADDKEKLTKFLRWRIQFMEKSIRNLDFSPDGINTFVQVLDLKNSPGLFFYKKELRQATNRALLLLQDNYPEFVAKQVFINVPWWYPAYYRMINASFTTRTKSKFVFAGPSRSADTLFKYIAPEQVPAQYGGLSKEGEEEFTTAEPATEEIIKPASKHTIEFPVTEKSTLVWEARVTGWDVSYGAEFVPSAEGGYTILIEKSRKVGANESVISTSYKASEAGKVVITIDNQTSKKKKLVYRSKNKISDC

SEQ ID NO: 61 - DNA, 2297 bp, Medicago truncatula
ttatacataaaacacatcaacccaagcccaattgtctccaactccaactccaaacccatcatctcactctctctatattagtcttttctcaatacccaaatatcactttttcttaaccttaaccttaaccctaatatcatctcactcttttttcatatcaaatggctgctgaacctcaaaaacctgctgaagaagttgccacaaccacctctgaaactgttgttgagaaagaacaacaggctgatggagttgtagctgctgctgttaccgctgccgctgttaccgctgccaccactgataaggaagctgttgctgatcctcctcctgctgttgctgatgaggctgagaagccggcggaagttgtggctgataaggtggcggatgaaactgttgttgatgaaagcaaggtttctcaatcggtttcttttaaggaagaaactaacgtggtttctgaacttcctgacgttcagaaaaaagcacttgatgaacttaaacaacttattcaagaagcgcttaacaaacatgaattcaccgctcctccacccgctccagtcaaagcacctgaacctgaagtagctgtaaaagaagagaaaaagcctgaagaagatgaaaagaaaaccgaagaggtggtagaagagaagaaagatgaagcagtagttgaggagaagaaggttgatgaagaaaaaggttcaacctctgaggaacctaaagttgaaactgctgaacctgaaaaggaggagaagaaagtggaggaaacggttgtagaagttgttgagaaaatagctgcaagtaccgaagaagacggtgcgaaaacagttgaggctattcaggaaagtatagtatctgttccagttactgaaggtgaacaacctgttgctgagcctgttgctgaagtggaggttactcctattgtaccagaagaagttgaaatatggggaattccattactagctgatgaaagaagtgatgtgattcttctcaagttcttgagagctagggattttaaggtgaaggaggctttcactatgatcaaacaaaccgtgctttggcgaaaggaattcggagtcgaagcacttcttcaagaagatcttggaactgactgggacaaagttgttttcactgatggtactgacaaagaaggtcaccctgtttattacaatgtttttggtgagtttgaggataaggatttgtatcaaaaaacattctctgatgaagagaagagaaccaagttcgttcgttggtggattcagtctttggagaaaagtgttaggaaactcgactttgctccatctggtatctctactcttgttcagattaatgatcttaaaaattctcctggacttcttggtaagaaagagcttagacaatctattaagcagactcttcagttgcttcaggataactatcctgaatttgttgccaaacagattttcatcaatgttccttggtggtaccttgccttctctaggatgatcagtcctttcctgacacaaaggactaagagcaaatttgtatttgctggttcctccaaatctgctgaaacccttttcaaatatatagctcctgagcaagtgccagttaaatatggaggactgagcagagacggtgaacaggaattcaccactgctgaccctgctacagaggttactatcaaaccagcaactaaacatgctgttgagttcccagtttctgagaaaagcactttggtttgggaagtaagagttgtggattggaatgtgagctatggagcagaatttgtgcctagtgctgaagatggatacactgtgataatccagaagaacaggaaaattgctgcagctgatgaaacagtaattagcaacaccttcaaagttggtgaacctggaaaagttgtactcaccattgataaccaaacatccaagaaaaagaagctgctttacaggtccaagaccatacccatctctgagtaaaaggaaaaatgtttaaattcattatatggtcaataacattattgtgaaggttattgggtgggttacttatattcttttataggaatattttcttcatttggtttgtaaattattttgtttcaagtatggggttgggaaattttatttacagttattatcacttatcaatattcttaaattaatgtggtattttgttcttttgtgttggaattggatgaaacctttgctggatgaagaacacaattgggttcttttgtaaaacaaaagtttattgtttttgttatcttgtgactctgtgattgaaggatttatttgagtaatttttttattccaattagtctagtggcc

SEQ ID NO: 62 - protein, 595 aa, Medicago truncatula
MAAEPQKPAEEVATTTSETVVEKEQQADGVVAAAVTAAAVTAATTDKEAVADPPPAVADEAEKPAEVVADKVADETVVDESKVSQSVSFKEETNVVSELPDVQKKALDELKQLIQEALNKHEFTAPPPAPVKAPEPEVAVKEEKKPEEDEKKTEEVVEEKKDEAVVEEKKVDEEKGSTSEEPKVETAEPEKEEKKVEETVVEVVEKIAASTEEDGAKTVEAIQESIVSVPVTEGEQPVAEPVAEVEVTPIVPEEVEIWGIPLLADERSDVILLKFLRARDFKVKEAFTMIKQTVLWRKEFGVEALLQEDLGTDWDKVVFTDGTDKEGHPVYYNVFGEFEDKDLYQKTFSDEEKRTKFVRWWIQSLEKSVRKLDFAPSGISTLVQINDLKNSPGLLGKKELRQSIKQTLQLLQDNYPEFVAKQIFINVPWWYLAFSRMISPFLTQRTKSKFVFAGSSKSAETLFKYIAPEQVPVKYGGLSRDGEQEFTTADPATEVTIKPATKHAVEFPVSEKSTLVWEVRVVDWNVSYGAEFVPSAEDGYTVIIQKNRKIAAADETVISNTFKVGEPGKVVLTIDNQTSKKKKLLYRSKTIPISE

SEQ ID NO: 63 - DNA, 1510 bp, Beta vulgaris
  misc_feature (2)..(3): n is a, c, g, or t
tnncccgggctgcaggaattcggcacgagctcatttctctacatcaaaaacacaacaaagagatcacccatggcggaagaaacccataagccagaatcaacggtggctgaagtggtggttccagtagccgagaaaccagctgagaagccagctgagaaggcagttctaccacctgaagctgagaaactagctgcagctgaatcagctgaagccgagaagccagctgattcagccgaggctaagatagctcaacaagtctcattcaaagaggagactaatgttgcaagtgagctacctgagctacatagaaaggctctcgaggacttgaagaaacttattcaagaagccctcgagaagcacgagttctcttctcctcctcctccgcctccgcctgctccagctaaagttgaggagaaggcggaagagaagaaagaggaacaacctccatccaccacctccaccaccaccaccaccaccaccgcggtttcagatgaggttgctgttgctcctccatccgaagaggccccgaaaactgacgaggcctctccgaaagtggaggaggagcctgcaaaaatagttgagcaaccacctacaacaccggcagaagaacctgaaccagcaaaaacacctgaggttgttgttgctgaagaggagaaaactggtgaggatattaaagaaactatagtagtcgaggttgcgacaactacagcagcaccagtactaacagaaccagaatctgttgaggagacaccaaaagaagctgaagttgtagtggaagaatcaccaaaggagccagaagaagtatcaatatggggaattccacttcttgctgatgaaagaagtgatgtaattctattgaaattcttaagagcaagagattatagagtgaaagatgctttcactatgattagaaatactgctcgttggagaaaagaatttgaggttgattctttacttgatgaagatcttggaaatgattatgagaaagttgtttttacacatggagttgataaacaaggtcgtcctgtttgttataatgtgtttggagagtttcaaaataaggaactttatcagaatactttctctgatgcagaaaaaaggaaaaagttcttgagatggttgattcaattccttgaaaaaactattagaactcttgattttagtcctgaaggaattaattcttttgttcttgttaatgatttgaagaattctcctgggtatggtaagagagatctttacaaagttattgacaagtttcttgagattctccaggataattacccagaatttgctgctaaacagttgtgcatcaatgtttcatggtggtcttggcatacaactggatctatttgactgtatttacaccaaggagcaagagcaagtttgtgtttgcaagcccatctaaaactgctgagacccttttcaagtacatagctcctgagcaggtgcctgttcaatttggtgggcacagcaagtttggcgagcatgagttttcccctgctgatactgt

SEQ ID NO: 64 - protein, 427 aa, Beta vulgaris
MAEETHKPESTVAEVVVPVAEKPAEKPAEKAVLPPEAEKLAAAESAEAEKPADSAEAKIAQQVSFKEETNVASELPELHRKALEDLKKLIQEALEKHEFSSPPPPPPPAPAKVEEKAEEKKEEQPPSTTSTTTTTTTAVSDEVAVAPPSEEAPKTDEASPKVEEEPAKIVEQPPTTPAEEPEPAKTPEVVVAEEEKTGEDIKETIVVEVATTTAAPVLTEPESVEETPKEAEVVVEESPKEPEEVSIWGIPLLADERSDVILLKFLRARDYRVKDAFTMIRNTARWRKEFEVDSLLDEDLGNDYEKVVFTHGVDKQGRPVCYNVFGEFQNKELYQNTFSDAEKRKKFLRWLIQFLEKTIRTLDFSPEGINSFVLVNDLKNSPGYGKRDLYKVIDKFLEILQDNYPEFAAKQLCINVSWWSWHTTGSI

SEQ ID NO: 65 - DNA, 552 bp, Chlamydomonas reinhardtii
gtcgtgctactcaagttcttgcgcgcacggcagtggaacgtggcggccgcagttaacatgcttgtcaactgtctgcggtggcggcgcgacttcgacgtggccggcctcggcctggagaccttcccgccgcagctggcggcggcggggcagctcaccggacacgaccgggccggcaacccagtcacctacaactactacggcacgggtgtggacttgaacgcggtgatgggcagcccgggcggtgtggccaccttcgtgcggtggcgggtgcggctgatggagcaggcgattgcgcagctggacttcgagcgcggcgtggagcacgtcacgcagatccacgactacgccggcgcctccatgttccgcatggacgcgggcatcaagtccgccagccgcgagatcatacgactgttccaggacaactatcccgaactgctgtccgccaagctgttcctcaacgtgccgcgggtcatggagttcctgttcggcgtgttcagcggcctggcggacgccgccacccgcgccaagttcaccatggcctcgcccgcccgc

SEQ ID NO: 66 - protein, 184 aa, Chlamydomonas reinhardtii
VVLLKFLRARQWNVAAAVNMLVNCLRWRRDFDVAGLGLETFPPQLAAAGQLTGHDRAGNPVTYNYYGTGVDLNAVMGSPGGVATFVRWRVRLMEQAIAQLDFERGVEHVTQIHDYAGASMFRMDAGIKSASREIIRLFQDNYPELLSAKLFLNVPRVMEFLFGVFSGLADAATRAKFTMASPAR

SEQ ID NO: 67 - DNA, 1335 bp, Dictyostelium discoideum
atgagtggatttattaaagatttatctcaacctcaaagtgaagctttaaatcaatttaaagaatatttaaataaaaaagaaacaattgtgcaaattaaatcagatattaaaaataaattaccaacaactacaacaactacaacaactactaatacagaaacagaagaatcatcatcatcatcatcaccatcatcaaaagaagaagaaaaacacttaaaaatttggaatattaatttagaaaatgattcaaaagagcgtgatattattttattaaaatttttacgtgctagagaatttaaaattgaaaattcaaaacaaatgttaattgattgtttaatttggagaaaacaaaatcaagtagatgattatgaaaagatagttaatgaagcatttccagactattataaaaacattggtaccattttcaagactgataaagagggtagaccagtaatgatcaatcattaccatgcaattaatccagatgttattttcaaagatggtgtggaccaatttgttcgttggaaagtccaacaaatggaaatcgccattagggatacactcatcccatcgcaatgggaaattgaagatttaatagtcattcacgactataaagattgctcattctttagaatggatccacgtataaaacaagcatctaatcaaaccattcaaacccttcaaaataactacccagaatttttagctcgtaaattctttattaacatcccatggttaatggagaagttgttctcaattttcacagtattcacatcagagcgtacaaaaagcaaattcataatttgttctggaaattatcgggaaaaacttttaaaatatattgaagcagattcaatcgctccaaaattatctggtttcgaagataaccaatcaccaattttaaatattaaaatcaaacctcaaaaatcacattcaattcaattaggtaaacttgatgctgataaaactattgaatgggaattttgtacaaatgagattgattctgaaattggtgctaaaattttaattgaaccaaataaccaaccaacaacttctaatgatattttatattttaataataatagtaataataataataataataataattcaccaacaccaagtaatagtaattatccattcaattgttttctttcaattgaaccaagagaatttaatagtggttcaattcaaattgaagatgattcttattatactttagtttttaataatcatttaaataaacaatgtgatttattttatcgtataactataaaatcaaaaacaactcattcttcaactacaacttcaacaatcgaaactttaggaaattaa

SEQ ID NO: 68 - protein, 444 aa, Dictyostelium discoideum
MSGFIKDLSQPQSEALNQFKEYLNKKETIVQIKSDIKNKLPTTTTTTTTTNTETEESSSSSSPSSKEEEKHLKIWNINLENDSKERDIILLKFLRAREFKIENSKQMLIDCLIWRKQNQVDDYEKIVNEAFPDYYKNIGTIFKTDKEGRPVMINHYHAINPDVIFKDGVDQFVRWKVQQMEIAIRDTLIPSQWEIEDLIVIHDYKDCSFFRMDPRIKQASNQTIQTLQNNYPEFLARKFFINIPWLMEKLFSIFTVFTSERTKSKFIICSGNYREKLLKYIEADSIAPKLSGFEDNQSPILNIKIKPQKSHSIQLGKLDADKTIEWEFCTNEIDSEIGAKILIEPNNQPTTSNDILYFNNNSNNNNNNNNSPTPSNSNYPFNCFLSIEPREFNSGSIQIEDDSYYTLVFNNHLNKQCDLFYRITIKSKTTHSSTTTSTIETLGN

SEQ ID NO: 69 - protein, 8 aa, Artificial sequence
  Conserved motif 1 of a PATL polypeptide
  VARIANT (2)..(2): / replace = "Thr"
LLKFLRAR

SEQ ID NO: 70 - protein, 8 aa, Artificial sequence
  Conserved motif 2 of a PATL polypeptide
  VARIANT (1)..(1): Xaa can be Leu or Phe
  VARIANT (2)..(2): Xaa can be Gln or Glu
XXDNYPEF

SEQ ID NO: 71 - protein, 169 aa, Artificial sequence
  SEC domain
LPELDSVVFYRGADREGHPVCYNVYGEFQDKDLYEKAFGDEEKRERFLKWRIQLLERGILSQLDFSPSGICSMVQVTDLKNSPPMLGKHRAVTRQAVALLQDNYPEFIAKKVFINVPWWYLAANKMMSPFLTQRTKSKFIFASPAKSAETLFRYIAPEQVPVQFGGLFK

SEQ ID NO: 72 - protein, 102 aa, Artificial sequence
  GOLD domain
SDAVTELTIKPSSKETVEIPVTENSTIGWELRVLGWEVSYGAEFTPDAEGGYTVIVQKTRKVPANEEPIMKGSFKVGEPGKIVLTINNPASKKKKLLYRSKV

SEQ ID NO: 73 - DNA, 51 bp, Artificial sequence
  primer 1
ggggacaagtttgtacaaaaaagcaggcttaaacaatggcggaggagccac

SEQ ID NO: 74 - DNA, 50 bp, Artificial sequence
  primer 2
ggggaccactttgtacaagaaagctgggtgtggtgaatctggtgatcagg

SEQ ID NO: 75 - DNA, 2194 bp, Oryza sativa
aatccgaaaagtttctgcaccgttttcaccccctaactaacaatatagggaacgtgtgctaaatataaaatgagaccttatatatgtagcgctgataactagaactatgcaagaaaaactcatccacctactttagtggcaatcgggctaaataaaaaagagtcgctacactagtttcgttttccttagtaattaagtgggaaaatgaaatcattattgcttagaatatacgttcacatctctgtcatgaagttaaattattcgaggtagccataattgtcatcaaactcttcttgaataaaaaaatctttctagctgaactcaatgggtaaagagagagattttttttaaaaaaatagaatgaagatattctgaacgtattggcaaagatttaaacatataattatataattttatagtttgtgcattcgtcatatcgcacatcattaaggacatgtcttactccatcccaatttttatttagtaattaaagacaattgacttatttttattatttatcttttttcgattagatgcaaggtacttacgcacacactttgtgctcatgtgcatgtgtgagtgcacctcctcaatacacgttcaactagcaacacatctctaatatcactcgcctatttaatacatttaggtagcaatatctgaattcaagcactccaccatcaccagaccacttttaataatatctaaaatacaaaaaataattttacagaatagcatgaaaagtatgaaacgaactatttaggtttttcacatacaaaaaaaaaaagaattttgctcgtgcgcgagcgccaatctcccatattgggcacacaggcaacaacagagtggctgcccacagaacaacccacaaaaaacgatgatctaacggaggacagcaagtccgcaacaaccttttaacagcaggctttgcggccaggagagaggaggagaggcaaagaaaaccaagcatcctccttctcccatctataaattcctccccccttttcccctctctatataggaggcatccaagccaagaagagggagagcaccaaggacacgcgactagcagaagccgagcgaccgccttctcgatccatatcttccggtcgagttcttggtcgatctcttccctcctccacctcctcctcacagggtatgtgcctcccttcggttgttcttggatttattgttctaggttgtgtagtacgggcgttgatgttaggaaaggggatctgtatctgtgatgattcctgttcttggatttgggatagaggggttcttgatgttgcatgttatcggttcggtttgattagtagtatggttttcaatcgtctggagagctctatggaaatgaaatggtttagggatcggaatcttgcgattttgtgagtaccttttgtttgaggtaaaatcagagcaccggtgattttgcttggtgtaataaagtacggttgtttggtcctcgattctggtagtgatgcttctcgatttgacgaagctatcctttgtttattccctattgaacaaaaataatccaactttgaagacggtcccgttgatgagattgaatgattgattcttaagcctgtccaaaatttcgcagctggcttgtttagatacagtagtccccatcacgaaattcatggaaacagttataatcctcaggaacaggggattccctgttcttccgatttgctttagtcccagaattttttttcccaaatatcttaaaaagtcactttctggttcagttcaatgaattgattgctacaaataatgcttttatagcgttatcctagctgtagttcagttaataggtaatacccctatagtttagtcaggagaagaacttatccgatttctgatctccatttttaattatatgaaatgaactgtagcataagcagtattcatttggattattttttttattagctctcaccccttcattattctgagctgaaagtctggcatgaactgtcctcaattttgttttcaaattcacatcgattatctatgcattatcctcttgtatctacctgtagaagtttctttttggttattccttgactgcttgattacagaaagaaatttatgaagctgtaatcgggatagttatactgcttgttcttatgattcatttcctttgtgcagttcttggtgtagcttgccactttcaccagcaaagttc

SEQ ID NO: 76 - DNA, 1182 bp, Arabidopsis thaliana
atggcggagatacagtcaaatggaagggcatatgagtcattattggaaaaggttctttcaatgaacattctttcttctgactattttaaagagctctatggtttaaagacttatcatgaggtaattgatgaaatctacaaccaagttaatcatgtggagccgtggatgggtgggaattgccgtggtccttcaacagcgtattgtcttctctacaaattctttaccatgaaacttacagtgaagcagatgcatggactgttaaagcacacagattctccttatattagagcggttggattcctatatttaagatatgttgcagatgcaaagacgttgtggacatggtatgaaccatacattaaagatgatgaggagttttcaccaggaccaaatggacggatgacgacaatgggtgtttatgtacgtgatttgctgcttggactgtactactttgatactttgtttcctcgtatacctgttcctgtcatgcgccagattgtatcaaaccttgagaagatgaatttaccaactaaaccttctggttcaaccggagacatgacccgtggctcagaagacactgcccgtcgtccaccatcagtaaaagcatccctctctgcttcatttggtcagcgtgcacctcatcgtgcttccaccagaggctcttctcctgttcgccgtcctccaccgactggttatgacagaaatggaggcgatgaagtacaacagcggtccccacgtagaagccagagccgagactattattctgacagagactcagatagacaacgggaaagagagagggagaaagaccgcgaaagagagagggggagggatagatacagagaaagggaaagggattatggtaatgataggagatcaaggcgtgactatgatagtagaagcaggcgcaatgattatgaggacgacagaagtagacatgaccggagaagcaggagcagaagcagaagtaggagcaggagtgtgcagattgagcgtgaaccgactcctaaaagagatagtagcaacaaagagaaatcggcggtgacagtgaacagcaatctcgcaaagctaaaagatttgtatggagacgcaagtagtcagaaaagggatgaaggatttggaacaaggaaagattcaagttcagaagaagtgataaagcttggtggttcctcttggaggtga

SEQ ID NO: 77 - protein, 393 aa, Arabidopsis thaliana
MAEIQSNGRAYESLLEKVLSMNILSSDYFKELYGLKTYHEVIDEIYNQVNHVEPWMGGNCRGPSTAYCLLYKFFTMKLTVKQMHGLLKHTDSPYIRAVGFLYLRYVADAKTLWTWYEPYIKDDEEFSPGPNGRMTTMGVYVRDLLLGLYYFDTLFPRIPVPVMRQIVSNLEKMNLPTKPSGSTGDMTRGSEDTARRPPSVKASLSASFGQRAPHRASTRGSSPVRRPPPTGYDRNGGDEVQQRSPRRSQSRDYYSDRDSDRQREREREKDRERERGRDRYRERERDYGNDRRSRRDYDSRSRRNDYEDDRSRHDRRSRSRSRSRSRSVQIEREPTPKRDSSNKEKSAVTVNSNLAKLKDLYGDASSQKRDEGFGTRKDSSSEEVIKLGGSSWR

SEQ ID NO: 78 - DNA, 1182 bp, Arabidopsis thaliana
atggcggagatacagtcaaatggaagggcatatgagtcattattggaaaaggttctttcaatgaacattctttcttctgactattttaaagagctctatggtttaaagacttatcatgaggtaattgatgaaatctacaaccaagttaatcatgtggagccgtggatgggtgggaattgccgtggtccttcaacagcgtattgtcttctctacaaattctttaccatgaaacttacagtgaagcagatgcatggactgttaaagcacacagattctccttatattagagcggttggattcctatatttaagatatgttgcagatgcaaagacgttgtggacatggtatgaaccatacattaaagatgatgaggagttttcaccaggatcaaatggacggatgacgacaatgggtgtttatgtacgtgatttgctgcttggactgtactactttgatactttgtttcctcgtatacctgttcctgtcatgcgccagattgtatcaaaccttgagaagatgaatttaccaactaaaccttctggttcaaccggagacatgacccgtggctcagaagacactgcccgtcgtccaccatcagtaaaagcatccctctctgtttcatttggtcagcgtgcacctcatcgtgcttccaccagaggctcttctcctgttcgccgtcctccaccgactggttatgacagaaatggaggcgatgaagtacaacagcggtccccacgtagaagccagagccgagactattattctgacagagactcagatagacaacgggaaagagagagggagaaagaccgcgaaagagagagggggagggatagatacagagaaagggaaagggattatggtaatgataggagatcaaggcgtgactatgatagtagaagcaggcgcaatgattatgaggacgacagaagtagacatgaccggagaagcaggagcagaagcagaagtaggagcaggagtgtgcagattgagcgtgaaccgactcctaaaagagatagtagcaacaaagagaaatcggcggtgacagtgaacagcaatctcgcaaagctaaaagatttgtatggagacgcaagtagtcagaaaagggatgaaggatttggaacaaggaaagattcaagttcagaagaagtgataaagcttggtggttcctcttggaggtga

SEQ ID NO: 79 - protein, 393 aa, Arabidopsis thaliana
MAEIQSNGRAYESLLEKVLSMNILSSDYFKELYGLKTYHEVIDEIYNQVNHVEPWMGGNCRGPSTAYCLLYKFFTMKLTVKQMHGLLKHTDSPYIRAVGFLYLRYVADAKTLWTWYEPYIKDDEEFSPGSNGRMTTMGVYVRDLLLGLYYFDTLFPRIPVPVMRQIVSNLEKMNLPTKPSGSTGDMTRGSEDTARRPPSVKASLSVSFGQRAPHRASTRGSSPVRRPPPTGYDRNGGDEVQQRSPRRSQSRDYYSDRDSDRQREREREKDRERERGRDRYRERERDYGNDRRSRRDYDSRSRRNDYEDDRSRHDRRSRSRSRSRSRSVQIEREPTPKRDSSNKEKSAVTVNSNLAKLKDLYGDASSQKRDEGFGTRKDSSSEEVIKLGGSSWR

SEQ ID NO: 80 - DNA, 1158 bp, Arabidopsis thaliana
atggcggagatacagtcaaatggaagggcatatgagtcattattggaaaaggttctttcaatgaacattctttcttctgactattttaaagagctctatggtttaaagacttatcatgaggtaattgatgaaatctacaaccaagttaatcatgtggagccgtggatgggtgggaattgccgtggtccttcaacagcgtattgtcttctctacaaattctttaccatgaaacttacagtgaagcagatgcatggactgttaaagcacacagattctccttatattagagcggttggattcctatatttaagatatgttgcagatgcaaagacgttgtggacatggtatgaaccatacattaaagatgatgaggagttttcaccaggatcaaatggacggatgacgacaatgggtgtttattactactttgatactttgtttcctcgtatacctgttcctgtcatgcgccagattgtatcaaaccttgagaagatgaatttaccaactaaaccttctggttcaaccggagacatgacccgtggctcagaagacactgcccgtcgtccaccatcagtaaaagcatccctctctgtttcatttggtcagcgtgcacctcatcgtgcttccaccagaggctcttctcctgttcgccgtcctccaccgactggttatgacagaaatggaggcgatgaagtacaacagcggtccccacgtagaagccagagccgagactattattctgacagagactcagatagacaacgggaaagagagagggagaaagaccgcgaaagagagagggggagggatagatacagagaaagggaaagggattatggtaatgataggagatcaaggcgtgactatgatagtagaagcaggcgcaatgattatgaggacgacagaagtagacatgaccggagaagcaggagcagaagcagaagtaggagcaggagtgtgcagattgagcgtgaaccgactcctaaaagagatagtagcaacaaagagaaatcggcggtgacagtgaacagcaatctcgcaaagctaaaagatttgtatggagacgcaagtagtcagaaaagggatgaaggatttggaacaaggaaagattcaagttcagaagaagtgataaagcttggtggttcctcttggaggtga

SEQ ID NO: 81 - protein, 385 aa, Arabidopsis thaliana
MAEIQSNGRAYESLLEKVLSMNILSSDYFKELYGLKTYHEVIDEIYNQVNHVEPWMGGNCRGPSTAYCLLYKFFTMKLTVKQMHGLLKHTDSPYIRAVGFLYLRYVADAKTLWTWYEPYIKDDEEFSPGSNGRMTTMGVYYYFDTLFPRIPVPVMRQIVSNLEKMNLPTKPSGSTGDMTRGSEDTARRPPSVKASLSVSFGQRAPHRASTRGSSPVRRPPPTGYDRNGGDEVQQRSPRRSQSRDYYSDRDSDRQREREREKDRERERGRDRYRERERDYGNDRRSRRDYDSRSRRNDYEDDRSRHDRRSRSRSRSRSRSVQIEREPTPKRDSSNKEKSAVTVNSNLAKLKDLYGDASSQKRDEGFGTRKDSSSEEVIKLGGSSWR

SEQ ID NO: 82 - DNA, 680 bp, Arabidopsis thaliana
caaaccttgagaagatgaatttaccaactaaaccttctggttcaaccggagacatgacccgtggctcagaagacactgcccgtcgtccaccatcagtaaaagcatctctctctgtttcatttggtcagcgtgcacctcatcgtgcttccaccagaggctcttctcctgttcgccgtcctccaccgactggttatgacagaaatggaggcgatgaagtacaacagcggtccccacgtagaagccagagccgagactattattctgacagagactcagatagacaacgggaaagagagagggagaaagaccgcgaaagagagagggggagggatagatacagagaaagggagagggattatggtaatgataggagatcaaggcgcgactatgatagtagaagcaggcgcaatgattatgaggacgacagaagtagacatgaccggagaagcaggagcagaagcagaagtaggagcaggagtgtgcagattgagcgtgaaccgactcctaaaagagatagtagcaacaaagagaaatcggcggtgacagtgaacagcaatctcgcaaagctaaaagatttgtatggagacgcaagtagtcagaaaagggatgaaggatttggaacaaggaaagattcaagttcagaagaagtgataaagcttggtggttcctcttggaggtga

SEQ ID NO: 83 - protein, 225 aa, Arabidopsis thaliana
NLEKMNLPTKPSGSTGDMTRGSEDTARRPPSVKASLSVSFGQRAPHRASTRGSSPVRRPPPTGYDRNGGDEVQQRSPRRSQSRDYYSDRDSDRQREREREKDRERERGRDRYRERERDYGNDRRSRRDYDSRSRRNDYEDDRSRHDRRSRSRSRSRSRSVQIEREPTPKRDSSNKEKSAVTVNSNLAKLKDLYGDASSQKRDEGFGTRKDSSSEEVIKLGGSSWR

SEQ ID NO: 84 - DNA, 1068 bp, Arabidopsis thaliana
atggcaaacagaacagatccgttggcaaagaatataagaggaacgaatccgcagaatctggtagagaagattgtgcgaacgaagatttatcagcacaccttttggaaggagcagtgctttggtctcacggcggagacattggtggacaaagctatggagctcgaccatctaggtggtacctttggtggtagccgcaagcctactccgttcctttgcctcatattgaagatgcttcaaatccagcctgagaaggaaattgtcgtggagttcataaaaaatgatgactacaaatatgttcgtattcttggtgcgttctatctgcgtctcactgggactgatgttgatgtctatcgctacctcgaacctctctacaatgactaccggaaagtgagacaaaagttatctgatgggaagttttcgctgacacatgtggacgaagtcattgaggaacttctaaccaaggattattcttgtgatattgcaatgccacgtttgaagaaaaggtggacgcttgaacagaatggtttattagagccaaggaaaagtgttttggaagacgactttgaagaagaggaagaaaaggaggagaatgaagggattgctgatggatctgaagatgagatggatcagcgccgtaagagtcctgaaagagaaagagaaagagacagagacaggagacgcgacagtcatagacacagggatcgtgattatgacagagactatgatatggatcgagatcatgacagagactatgaaagagaacgtgggcatggtcgagaccgggatagggagagagacagggatcactatagagagcgagatagggacagggaaagaggcagagatagagaacgagacagaagagacagggcaaggcgcagaagtagaagcaggagtagggatcgtaagagacatgaaactgatgatgtgcgggatcgggaagaacctaagaaaaagaaagaaaagaaggagaagatgaaggaagatggaaccgatcatccaaatcctgaaattgcagagatgaatagactgagagcatcactgggaatgaaacccctcagggactga

SEQ ID NO: 85 - protein, 355 aa, Arabidopsis thaliana
MANRTDPLAKNIRGTNPQNLVEKIVRTKIYQHTFWKEQCFGLTAETLVDKAMELDHLGGTFGGSRKPTPFLCLILKMLQIQPEKEIVVEFIKNDDYKYVRILGAFYLRLTGTDVDVYRYLEPLYNDYRKVRQKLSDGKFSLTHVDEVIEELLTKDYSCDIAMPRLKKRWTLEQNGLLEPRKSVLEDDFEEEEEKEENEGIADGSEDEMDQRRKSPERERERDRDRRRDSHRHRDRDYDRDYDMDRDHDRDYERERGHGRDRDRERDRDHYRERDRDRERGRDRERDRRDRARRRSRSRSRDRKRHETDDVRDREEPKKKKEKKEKMKEDGTDHPNPEIAEMNRLRASLGMKPLRD

SEQ ID NO: 86 - DNA, 1185 bp, Brachypodium sylvaticum
atggagatacagtcgtccgggaggcccatcgaggtgctcatggagaaggtgctgtccatgaacatcgtctcctcggactacttcaaggagctctacaagatcaagacgtaccacgaggtcatcgacgagatctacaaccaggtcgaccacgtcgagccgtggatgaccggcaactgccgcggcccatccaccgccttctgcctcctctacaagctcttcaccatgaagctcaccatgaaccagatgcacggcctgctcaagcaccctgattccccttacatcagagctattggatttctctacctacgatacgttgcggaaccaaagacgctatggacttggtatgagccctacattaaagatgatgaggagttttcccctgggtcgaatggtaaaatgacaactatgggcgtttatgtgcgtgatgtcctccttggccagtactacttcgacagtcttcttccgcgagtgcctctcctaattttgcgacaggtcagtgcccatcttgagaagatgaagctcccaacaaagcagtcagggatgactggggattcaagtcgccttggttcagatgatactgcccggcgtcctccttcggtgaaggcctctttgtctgtctcttttggtcagcgtgcgccacaccgtgcgtccacaagggactcgtctccagttcgaaagacattgccttctatacgggaaagggaaaggagtcatgacggtgatcgtgcaaaatctccacccaggaagcgccgaagtgaaagtcgggagcgtaatcgtgaaactgagagggaccgttcggatcgtgatcgtggtagatataacgatagagaacaaggtcggcaaagccgtgacagcagagatcgtgattaccatcgttcgagctatgcagaaagagatgttgaaagacgaggccatgaaaggagggacaggaactctgatcgaaatggacgttcgagcgcccacagaagcaggagtaggagcaggagtccaagccgtggcagaaccaacggggaccaccgtcgctctagcccatttggtaaagcacccgagtcatccaacttggctaagttgaaggatctttacggcgatgcgtcaaatgcaaaggaagatgcaggcgatggtagagctcgcagggattccggagctgaagaggtaatcagattgggaggtgcaaggtggaggtga

SEQ ID NO: 87 - protein, 394 aa, Brachypodium sylvaticum
MEIQSSGRPIEVLMEKVLSMNIVSSDYFKELYKIKTYHEVIDEIYNQVDHVEPWMTGNCRGPSTAFCLLYKLFTMKLTMNQMHGLLKHPDSPYIRAIGFLYLRYVAEPKTLWTWYEPYIKDDEEFSPGSNGKMTTMGVYVRDVLLGQYYFDSLLPRVPLLILRQVSAHLEKMKLPTKQSGMTGDSSRLGSDDTARRPPSVKASLSVSFGQRAPHRASTRDSSPVRKTLPSIRERERSHDGDRAKSPPRKRRSESRERNRETERDRSDRDRGRYNDREQGRQSRDSRDRDYHRSSYAERDVERRGHERRDRNSDRNGRSSAHRSRSRSRSPSRGRTNGDHRRSSPFGKAPESSNLAKLKDLYGDASNAKEDAGDGRARRDSGAEEVIRLGGARWR

SEQ ID NO: 88 - DNA, 489 bp, Brachypodium sylvaticum
atggagatacagtcgtccgggaggcccatcgaggtgctcatggagaaggtgctgtccatgaacatcgtctcctcggactacttcaaggagctctacaagatcaagacgtaccacgaggtcatcgacgagatctacaaccaggtcgaccacgtcgagccgtggatgaccggcaactgccgcggcccatccaccgccttctgcctcctctacaagctcttcaccatgaagctcaccatgaaccagatgcacggcctgctcaagcaccctgattccccttacatcagagctattggatttctctacctacgatacgttgcggaaccaaagacgctatggacttggtatgagccctacattaaagatgatgaggagttttcccctgggtcgaatggtaaaatgacaactatgggcgtttatgtgcgtgatgtcctccttggccaggtatatctcttaaagtatgctcccacttcttccattaaacatatttga

SEQ ID NO: 89 - protein, 162 aa, Brachypodium sylvaticum
MEIQSSGRPIEVLMEKVLSMNIVSSDYFKELYKIKTYHEVIDEIYNQVDHVEPWMTGNCRGPSTAFCLLYKLFTMKLTMNQMHGLLKHPDSPYIRAIGFLYLRYVAEPKTLWTWYEPYIKDDEEFSPGSNGKMTTMGVYVRDVLLGQVYLLKYAPTSSIKHI

SEQ ID NO: 90 - DNA, 1116 bp, Chlamydomonas reinhardtii
atggaaatccatggctccaacaccaccttcaacctcgagaacgtgctgcgtcaaaacatcctgagctcggactactacaaggggacctgctcggaactgagcaactgttcagacattgtggacgaaatctacgagtctgtcgatcatgtggaaccttggatgagcggcaacgcgcgcgggccttccacggccttctgccttctgcaccgcctcttcacgctcaagctctcagcaaaggaggtgaaaggcatgctggaccacaaggactctccctacatccgcgcagtgggcttcctgtacctgcgctacgtgggggacccgaagacgctgtggagctgggtggcgccgtacgtgaaggatcaggagaaattttcgccgagcgggccgaacgagaaggaggtggccatgggcgactacgtacgtgacctgctgctctcccagtactacttcgagaccatcttcccgcgcatcccgaagcccgtgcaagaccaaatcaacgacgagctgacgaagcgcagcctggccacgacggccaagggcaatggcggcgccggcggcgctgaccgccgcggcatggacgactccggcaaccgtcgacccgcctcggtgaaggcgtcgctgtcggtcgcgttcggccagcgcgcgcccaaccgctccggtgctcgcgaggagggtcgcggccgggacccatcgcttgcgcagcgcgacggcactgcagcggctcgcggcggccgcggctccgcctcgccggagccgccacgcgaccggcgggaggcgccggcaccgcggcgggatttcgaccgggagcgggacgtgcgcggaggcggtggtggcggcgctgaccgccgtgacaaccgggactacggccgcgaccgggaccgtggtcgcgactacgacaagagccgggattatgacaagagccgggattacgccaagggcagggactatgaccgggggcgggactacgggcgcggcggtggcgctggtggtggcggccgcggctacgatgaccgccgggacgaacggcggcgcagccggagccggagccgcagccgggaccgcaacggcggcggtgctcgggacgcgcgcgatgtattcaaggacgcccggcggtag

SEQ ID NO: 91 - protein, 371 aa, Chlamydomonas reinhardtii
MEIHGSNTTFNLENVLRQNILSSDYYKGTCSELSNCSDIVDEIYESVDHVEPWMSGNARGPSTAFCLLHRLFTLKLSAKEVKGMLDHKDSPYIRAVGFLYLRYVGDPKTLWSWVAPYVKDQEKFSPSGPNEKEVAMGDYVRDLLLSQYYFETIFPRIPKPVQDQINDELTKRSLATTAKGNGGAGGADRRGMDDSGNRRPASVKASLSVAFGQRAPNRSGAREEGRGRDPSLAQRDGTAAARGGRGSASPEPPRDRREAPAPRRDFDRERDVRGGGGGGADRRDNRDYGRDRDRGRDYDKSRDYDKSRDYAKGRDYDRGRDYGRGGGAGGGGRGYDDRRDERRRSRSRSRSRDRNGGGARDARDVFKDARR

SEQ ID NO: 92 - DNA, 1676 bp, Hordeum vulgare
attcggcacgaggcctcccctttcctcgcctccttcatccatactccggcgatctcccagctaccgtcgaatcccaaacatcacaccctccgccgtcgccgaagccgatacgagttcatcctctacagagagtcgtcatcccctctggtttgggggtctccgcaagccgccctcgctctcggaagccaaggaggtcgtagggtttgcgcgcatcctccgtgtttgtgttcgctgaaatatggagatacagacttcaggaaagcccatcgatatgttgatggagaaggttctttgtatgaatattctttcttctgattacttcaaggagctctacaggatgaagacctatcatgaggtcattgacgagatctataaccaagttgatcatgtggagccttggatgactggcaattgcaggggtccttccactgcattttgtctcctgtacaagttcttcacaatgaagcttactgtgaaacagatgcatggtttgttgaagcatcctgactccccgtacattagagctataggatttttgtatcttcgatatgttgcagatccaaagatcctatggacatggtatgagccctacttgaaggatgatgaggaattctcccctggatctaatggtcgcatgacaaccatgggtgtatttgtgcgtgatcttatacttggacagtactactttgatagtatccttccaagagttcctgttccagtagttcgtcaagtaacagccaatcttgagaagatgaagctgcctaccaagctttctggggtgactggagacagtcgccacggatcagaggatactgcccgtcgccccccttctgttaaagcttctttgtcagtttcttttggacagcgtgcgccacaccgtgcttccacacgggattcttccccagtgcgacgaacagtcacccaagatgatcaacggagatcatcttccccatttcgtcgtagtgcaagtcgggaggggccttacagtgaccgttcaattcacgaccgagaaggtaaccgttcaagccgtgaccgagatactgaccattcaagccgtgaccgagatactgtccgttcaagccgtgaccgagatactggccgttcaagccgtgaccgagatactggcctttcaagccgtgacagagagcgtgattatgaccgtgacagcagggattgtgactattacaggttcaggcattcagaagaaaaaaggaattaccgaagcgaacatgacaatagtagacacagacgctccagctcatgtcataggagcagaagccggagtcggagcaggagcaggagcaggaatgagcatcgttccagtccatttggggatacaagcaaagagaaggctgctgctgcctcgagcaacctagctaagctgaaagacctgtacggcgacgtagctgagaagaaggatgatggtgatgccaggcggcttcaccatgattcatgtgccgaagaggttattaggttgggaggccctaggtggagataaatatgaaccgccgactctgtcatccaggtcatgctgttactgcaccgttcgatttacctgcttttgcattgacattagtgagatcactctttgtaaacactcggtactttatgtggttcattaatccatatcttttggacgtgcagtcaatctatcaaattcatcaacgtaaaaaaag

SEQ ID NO: 93 - protein, 365 aa, Hordeum vulgare
MEIQTSGKPIDMLMEKVLCMNILSSDYFKELYRMKTYHEVIDEIYNQVDHVEPWMTGNCRGPSTAFCLLYKFFTMKLTVKQMHGLLKHPDSPYIRAIGFLYLRYVADPKILWTWYEPYLKDDEEFSPGSNGRMTTMGVFVRDLILGQYYFDSILPRVPVPVVRQVTANLEKMKLPTKLSGVTGDSRHGSEDTARRPPSVKASLSVSFGQRAPHRASTRDSSPVRRTVTQDDQRRSSSPFRRSASREGPYSDRSIHDREGNRSSRDRDTDHSSRDRDTVRSSRDRDTGRSSRDRDTGLSSRDRERDYDRDSRDCDYYRFRHSEEKRNYRSEHDNSRHRRSSSCHRSRSRSRSRSRSRNEHRSSPFG

SEQ ID NO: 94 - DNA, 1824 bp, Lycopersicum esculentum
gagcttttgtatcccctcgatctccggttcctctctccttcttcttctcttcgtcgtcaattttccattttccctcatcgattctccggcggaaaaccgaaaaaaggtaattcataatctgaacctaaaccttttccgatatcatttttattgttggccacagaaggtaggaaaagataacactctggtgtccaagtcactaagggcatggctgagcttaagacttctgggagacctatagaccagttgttggagaaggttctctgcatgaacattctatcttctgattacttcagagaccttttgcgcctgaaaacttatcatgaagtgattgatgaaatctataatcaagttgaccatgtggaaccatggatgactggcaactgtcgtggtccttcaacagccttctgccttctctacaagttcttcacaatgaaacttactgtcaagcaaatgcatggcctgttaaagcatccagattctccttacattagagctattgggttcctttatctgagatatcttggtgattttaagacattatggggttggtatgagccttacctcaaagatgatgaggaattctctcctggatccagtgggcaaatgaccacaatgggtgtatatgtgcgtgacttatttctcgggcagtattattttgacacactactaccccgcattcctgttcctgtcgtgcggacagcagttgccagtctcgaaaaaatgaatctgccgaccaaactttctgggtcgattggggattctagtcgtggatctgaggaaacttctcgccggccaccttctgtcaaagcttccctttcagtgtcctttggtcagcgggcacctcatcgtgcatcaactagagattcatctcccatccgaagaacaattgcaccaccatcctatgataaggatggtgcaaatggttcaagacgttcccccagcatgcgccggagtcaaagccgtgatttatctgaccgggaaaattctgaaagggacaggggccgggaccgggacagggacagggacagggacagggacagggacagggaaagaactagggacagagaacgtgatagggatagggatagggataggtatagggaccaggaaagagaaagggataggggcagggatcgggatagagatagaaggtatgataacgaaagagatcgtgaaagggacagagacaggaggcatgattatgacagagaccggggaagggatagagacaggaggtatgactatgatcgaaggtcaattgagagaagcagaagagactatgacaggagcaggagccgtagtaggagtagaagccacagccgaagcttgcatgatcaaggtacaaggcttgaccagcagcgaactccacctagggatgagagcaaggagaagaaggctgcatctagcaatctggccaagcttaaagatctatatggcgacttcggcaataaaaaggagaacataggtgatgacagggctccaaatagggatactagtactgaggaggttatcagacttggtggttctacatggaggtagttggttacatttacgttttgtaagagtttggatactctcactgtctcaccttctcagaagagcacattgacagctagccttttgttgaaagggaatatgcaaactgatagctgcagagaggagatgctgtttcatgttttctgcagtcggcagagctgcttgtaaactggatttcctttactattattttagacttgtgttacaatattggatggatttcaattgtccctttgtttgttaaaacattattactacttaaagcaattgacaaacttataagcc

SEQ ID NO: 95 - protein, 444 aa, Lycopersicum esculentum
MAELKTSGRPIDQLLEKVLCMNILSSDYFRDLLRLKTYHEVIDEIYNQVDHVEPWMTGNCRGPSTAFCLLYKFFTMKLTVKQMHGLLKHPDSPYIRAIGFLYLRYLGDFKTLWGWYEPYLKDDEEFSPGSSGQMTTMGVYVRDLFLGQYYFDTLLPRIPVPVVRTAVASLEKMNLPTKLSGSIGDSSRGSEETSRRPPSVKASLSVSFGQRAPHRASTRDSSPIRRTIAPPSYDKDGANGSRRSPSMRRSQSRDLSDRENSERDRGRDRDRDRDRDRDRDRERTRDRERDRDRDRDRYRDQERERDRGRDRDRDRRYDNERDRERDRDRRHDYDRDRGRDRDRRYDYDRRSIERSRRDYDRSRSRSRSRSHSRSLHDQGTRLDQQRTPPRDESKEKKAASSNLAKLKDLYGDFGNKKENIGDDRAPNRDTSTEEVIRLGGSTWR

SEQ ID NO: 96 - DNA, 1157 bp, Medicago truncatula
atggcaaatcgcactgatccagcagcgaagagtattcgaggcacaaaccctcaaaaccttgttgaaaaaattctccgctcaaagatctatcagcacacttattggaaagaacaatgcttcggcttaacagcagaaaccctagtcgacaaagccatggagctcgaccacctcggcggaacttacggtggcaaccgcaaacccactcccttcatgtgcctcgtcatgaaaatgcttcagattcaacccgagaaagaaatcgtcatcgaattcatcaaaaacgatgattacaagtatgtgaggatactgggtgcattttatttgcgtcttactggatctgatacggatgtgtaccattatctggagccgttgtataatgattataggaaactgcggcggaaattaccggatggacagtttgctttgacacatgttgatgaggttattgatgaacttcttacaactgattattcctgtgatattgctatgccccgtattaagaaaaggtggactcttgaatctcttggtgccttagaacctagacaaagtgcacttgaagaggattttgaggaggaagaggaaaatgaggataatgaacagcctgctgaggagcctgagaaggattataatcgtgggcgaagccctgcaagggaaagagatagggatagaagacgtgatagtcatagacacagggatcgtgactatgacagagaatatgatagagattatgacagagagcgaggacgtggccgagatagagatcgggacagagatagggaaaaggaaagggacagagatagggagagggacagagaccgatatcgtctgagggaagaaaaggattatggtcgtgagagagaaggtagggagcgcgagaggagagacagagatcgtgaccgtggtaggaggaggagctactcaaggagtcgaagtagaagcagggatcgcaaggatcatgatggtggggactacagaaagagacatgctcgaagtagcgtaagtccaagaagagatggagctgaggatggtgagccaaagaagaagaaggaaaagaaagaaaagaaggaaaagaaggatgacgggaccgaccatccagatccagagattgcagaagcaaacaggatacgagcatcactgggtttgaaaccacttaagatgtg

SEQ ID NO: 97 - protein, 385 aa, Medicago truncatula
MANRTDPAAKSIRGTNPQNLVEKILRSKIYQHTYWKEQCFGLTAETLVDKAMELDHLGGTYGGNRKPTPFMCLVMKMLQIQPEKEIVIEFIKNDDYKYVRILGAFYLRLTGSDTDVYHYLEPLYNDYRKLRRKLPDGQFALTHVDEVIDELLTTDYSCDIAMPRIKKRWTLESLGALEPRQSALEEDFEEEEENEDNEQPAEEPEKDYNRGRSPARERDRDRRRDSHRHRDRDYDREYDRDYDRERGRGRDRDRDRDREKERDRDRERDRDRYRLREEKDYGREREGRERERRDRDRDRGRRRSYSRSRSRSRDRKDHDGGDYRKRHARSSVSPRRDGAEDGEPKKKKEKKEKKEKKDDGTDHPDPEIAEANRIRASLGLKPLKM

SEQ ID NO: 98 - DNA, 1305 bp, Oryza sativa
atggagatacaaacttcagggaagcccattgatctgctgatggagaaggttctttgtatgaacattatgtcttctgattacttcaaggagctctacaggctgaagacctatcatgaggtcattgatgaaatatacaatcaagttgatcatgtggagccttggatgactggcaattgcaggggcccctccactgcattctgtctcctctacaagttcttcaccatgaagcttactgtcaaacagatgcatggtttgttgaagcatcctgattccccatacattagagctatagggttcttgtatcttcgatatgttgcagatccgaagatcttgtggacgtggtatgagccctacttgaaggatgatgaggaattctcccctggatctaatggtcgcatgacaaccatgggtgtttatgtgcgtgatcttatacttggacagtactacttcgatagtcttcttccaagagttcctcttccagtaattcgtcaagtgacatccaatcttgagaagatgaagttgcccactaagctttctgggattactggagagtctaatcgtcatggatcagaagatactgcccgccggcctccttccgtgaaggcttctctgtcagtttcctttggacagcgtgctccgcatcgtgcatccacacgggagtcatctccagttcggaggacagtcacccatgatggccatcgtaaatcttcctcaccatctcgccgtagcggaagccgcgaggttcctgatcgtgatcgatcaagccgtgaccgttctagtcgtgactatgaccgttcaagccatgaccgtgatcgtgaccattccagtcgtgactatgaccgtccaagccatgaccgtgaccgtgatcgtgaccgttccagtcgtgactatgaccgttcaagtcgtgaccgggatcatgatagagacatcagagactatcatcggcgtgatcgtgacagcagggaccgtgactataggtctaggcattcatccgaaagacaagatgaccgaagggaccgtgaccgtgagggtagcaggcacagacggtccagctctcggcacagaagcagaagccgcagccgcagccgcagccgcagcagaagcaggagccgcagcagaaatgaggagagatccagtccttttggcaatgcaggcaaagaaaagactgctgccatctcgagcaacctagcaaagctcaaggacttgtatggtgatgtaactgagaagaaggacgacggtgaagcccctcgccgtgattcgtgcgcggaggaggttatcaggttgggtggcccgagatggagatag

SEQ ID NO: 99 - protein, 434 aa, Oryza sativa
MEIQTSGKPIDLLMEKVLCMNIMSSDYFKELYRLKTYHEVIDEIYNQVDHVEPWMTGNCRGPSTAFCLLYKFFTMKLTVKQMHGLLKHPDSPYIRAIGFLYLRYVADPKILWTWYEPYLKDDEEFSPGSNGRMTTMGVYVRDLILGQYYFDSLLPRVPLPVIRQVTSNLEKMKLPTKLSGITGESNRHGSEDTARRPPSVKASLSVSFGQRAPHRASTRESSPVRRTVTHDGHRKSSSPSRRSGSREVPDRDRSSRDRSSRDYDRSSHDRDRDHSSRDYDRPSHDRDRDRDRSSRDYDRSSRDRDHDRDIRDYHRRDRDSRDRDYRSRHSSERQDDRRDRDREGSRHRRSSSRHRSRSRSRSRSRSRSRSRSRNEERSSPFGNAGKEKTAAISSNLAKLKDLYGDVTEKKDDGEAPRRDSCAEEVIRLGGPRWR

SEQ ID NO: 100 - DNA, 1179 bp, Oryza sativa
atggcgaaccgcacggaccccctggcgaagagcatccacgggacgaaccctcagaacctggtggagaagatcgtccggtccaagatctaccagagcacctactggaaggagcagtgctttggcctcaccgccgagaccctcgtcgacaaggccatggagctcgaccacaccggcggcacctacggcggcaaccgcaagcccacccccttcctctgcctcgccctcaagatgctccagatccagcccgacaaggacatcgtcgtcgagttcatcaagaacgaggattacaagtatgtccgtgttcttggtgccttctaccttcgcctcactgccaccgtcgccgacgtctaccaatacctcgagccgctctacaacgactaccgcaagatcaggcacaagctcagtgatggaaagtttaccctgacccacgtcgacgagttcattgacgacctcctcaccaaggactactcctgcgatacggccctcccccgcatccagaaaagatgggttcttgaaacttctggaactctagaaccaagaagaagtgcacttgaagatgattttgaggaagaggaggaagacaaggaggatgaacaacctatggatatagatgagccaaatggtcgtgaaaagcatgatcattatcgtggaaggagccctactagagatcgagacagggagaggaaacatgaaagacaccacagggaccgagattacgacagagatcgggattatggtaggggacgggaaagagaccgagatagagaccgtgaaagagatagagacagggatagagatcgggatcgggatcgggatcgagaccgtcatcgcatacgagatgaggactacagtcgagatagggaccgagcaagagatagggatggcagggaaagagaacgctgggacagagaccgtgggaggcgcaggagccgttcaaggagcaggagcagggatcgacgagaaagagaccgagaagatggagagtaccgtaggaggcgtgatcggggtagtgccagtcctcgaggtcatgcggaggatggtggctcaagagatgagccgaagaagagaaaggaaaagaaagagaagaagggtgaaggaaatgcaccagatccaaatgacccagagattatagaaatgaacaagctccgagcctctctagggttgaaaccactgaagtag

SEQ ID NO: 101 - protein, 392 aa, Oryza sativa
MANRTDPLAKSIHGTNPQNLVEKIVRSKIYQSTYWKEQCFGLTAETLVDKAMELDHTGGTYGGNRKPTPFLCLALKMLQIQPDKDIVVEFIKNEDYKYVRVLGAFYLRLTATVADVYQYLEPLYNDYRKIRHKLSDGKFTLTHVDEFIDDLLTKDYSCDTALPRIQKRWVLETSGTLEPRRSALEDDFEEEEEDKEDEQPMDIDEPNGREKHDHYRGRSPTRDRDRERKHERHHRDRDYDRDRDYGRGRERDRDRDRERDRDRDRDRDRDRDRDRHRIRDEDYSRDRDRARDRDGRERERWDRDRGRRRSRSRSRSRDRRERDREDGEYRRRRDRGSASPRGHAEDGGSRDEPKKRKEKKEKKGEGNAPDPNDPEIIEMNKLRASLGLKPLK

SEQ ID NO: 102 - DNA, 915 bp, Ostreococcus tauri
atgacgtactggaaggagaagtgcttcggcgtgagcgccgaggcgttggtcgatctcgcggtcgacctcaggtcggtgggtgggatttacggcgggaacaacagagcgacggagtttttgtgcctcacgctgaagctgttgcagatacagcctgagaaggagatcgtgttagagtttattaagaatgaggatcacaagtacgtcaggttgctcggcgcgttttacctacggttggtggggaaaccgacggacgtgtacagatacctcgagccgctgttgaacgactatagaaaggttcggtatcgcacgcgtgatgggaagtacgcactgacgcatgtggatgagtttgtgaacaatttgttgacgaaggatatgttttgcgacgtgacgctcccacgcgtgccgcatcgccaggtgttagaggccgcgggagcgcttgagccacgcgtatctgcgcttgaggaggatatcgcagatttggaggaagagctcgagagcgcggtggaggaggcaataggtcaacggatgaacatggatgtcgacgcaggcgaggccgctgccgcggcgtccactcgaggtgcgcgcgaggacggcgagatcgttgcgtcgggatcgaagcgttcgcgcgagcacgatggcgttcggtatcgagaatgtgacgatagcgacggtgacaggtacgtccgaaggcgcgagcggtcgagatctaggagtcgcgaccgcgtgccggcacgccgcgacgacgctcggcccggagttttggctagtggcgaagagatggatcacagagagaagaaggagaagaaagagaagaaggaaaaacgagagaagaaggagaagaccgagatggaccccgaaatcgcagaggcgaatgcgatcagggccaagctcgggttgaagccgcttcgtggatga

SEQ ID NO: 103 - protein, 304 aa, Ostreococcus tauri
MTYWKEKCFGVSAEALVDLAVDLRSVGGIYGGNNRATEFLCLTLKLLQIQPEKEIVLEFIKNEDHKYVRLLGAFYLRLVGKPTDVYRYLEPLLNDYRKVRYRTRDGKYALTHVDEFVNNLLTKDMFCDVTLPRVPHRQVLEAAGALEPRVSALEEDIADLEEELESAVEEAIGQRMNMDVDAGEAAAAASTRGAREDGEIVASGSKRSREHDGVRYRECDDSDGDRYVRRRERSRSRSRDRVPARRDDARPGVLASGEEMDHREKKEKKEKKEKREKKEKTEMDPEIAEANAIRAKLGLKPLRG

SEQ ID NO: 104 - DNA, 630 bp, Ostreococcus tauri
atgccgtcggtgatcgaaaaccacggacgaccgatctggaccccgttcgggaacggcgcggcgacgagcgggaagtcgcacggcgtcgaggaggtgcttcgacaaaacattgcgcactcagaatactttcgaaaacttcgtcgcgcggacgatctggggcgaccggcgtacgatttcatggcgctcgtggatgagatttatgaattggtcgatcactgcgaaccgtggatgtgcgggaacgcgcggggggcgtcgacggggttttgcatcttgtttcaattctgtgagatggagctcagcgacggcaacgtgtggcatttgttgaggcacggagactcgccgtttatccgagctttagggttcctgtatgtacggtacgtgaagaacgggcgggagctcttgaagtggtgcgaggagttcttcggagacgaggaaaagtttaaaccgtcgccggacgggaaggaggtgacgatgggcgcgttcgttcgcgacttgctgctcgagcagaggtacttcgaaaccatcctgccgaggattcctgaggttgcgaggagagagatcataaaggtctcggttgcggtggtcagggcgggagccgcattgctggtggttctcagccgcagtctgtga

SEQ ID NO: 105 - protein, 209 aa, Ostreococcus tauri
MPSVIENHGRPIWTPFGNGAATSGKSHGVEEVLRQNIAHSEYFRKLRRADDLGRPAYDFMALVDEIYELVDHCEPWMCGNARGASTGFCILFQFCEMELSDGNVWHLLRHGDSPFIRALGFLYVRYVKNGRELLKWCEEFFGDEEKFKPSPDGKEVTMGAFVRDLLLEQRYFETILPRIPEVARREIIKVSVAVVRAGAALLVVLSRSL

SEQ ID NO: 106 - DNA, 1409 bp, Populus trichocarpa
ctcaggagtgcttggattgtttagtacagtatggagatacagacaaatgggaaaccaatagattcgctgttagagaaggtcctttgtatgaacatactatcatcagattacttcaaggagctttaccgattaaagacataccatgaagtgatagatgaaatatacaatcaagttgaccatgttgagccatggatgactggcaactgtcgtggtccatctacttccttttgccttctatacaagttcttcaccatgaaactcactgtcaaacaaatgcatggtttgctaaagcacaaggattctccttatatcagagcggttgggttcctctacctgagatatgctggggatccaaagacactgtggaattggtttgaaccatatattaaagacgatgaggaattttctccaggaactagtggaaggaagacgacaatgggtgtttatgtgcgtgatttgcttctcggacagtactactttgatacccttttcccccgtattcctgttcctgtcatgcggcagatcacatcgaatctggagaagttgaagctaccaacaaaaatctctggttcgacaggggatggaaaccgtcatggatctgatgatacggcacgccggccaccatctgtgaaggcagcactttcagtctcttttggtcagcgtgctcctcatcgtgcatcaaccagggattcgtctcctgttcgtcgcacaataccttccccctcctatgacagaaccagtgatgattcacgaagtcgactcggccagagtcgtgaatattctgataaagaatattcagatcgggatcatgataggggtagggaaagggaccaagaccatgatcgggatagagagagggacagggttcgggatagggatcaggagagagaaagggaccgggatcgtgaaagggattgggatcagagtcgggacagagacagggatcgggaaagggatagatacagaaggtatgattatgatagaagttccaggtacactgatagggaaagcagaagggattctgaacagagcagccgtgacagaagtaggcattatagagaaagtagttcttatagaagccgcagtcgaagcaggagcaggagcaggagccgaagctcgcaagctggcgcatcaccatttgatcgccatccaactcctcaaagggatggaaacaaggataagacatctgcgcctagcaatctggctaagctcaaagatctttatggtgatcttagtgatcagaaaggggatgctggcctggaaagggttcctcggagggataatgatggtgaagaggtttttagactcggtggttccacttggaggtaggtagttcaatcttaaaacagtagcttcagtggctgtcacatcagctgtatcaatgaggtcttcagccaggccaaatttct

SEQ ID NO: 107 - protein, 432 aa, Populus trichocarpa
MEIQTNGKPIDSLLEKVLCMNILSSDYFKELYRLKTYHEVIDEIYNQVDHVEPWMTGNCRGPSTSFCLLYKFFTMKLTVKQMHGLLKHKDSPYIRAVGFLYLRYAGDPKTLWNWFEPYIKDDEEFSPGTSGRKTTMGVYVRDLLLGQYYFDTLFPRIPVPVMRQITSNLEKLKLPTKISGSTGDGNRHGSDDTARRPPSVKAALSVSFGQRAPHRASTRDSSPVRRTIPSPSYDRTSDDSRSRLGQSREYSDKEYSDRDHDRGRERDQDHDRDRERDRVRDRDQERERDRDRERDWDQSRDRDRDRERDRYRRYDYDRSSRYTDRESRRDSEQSSRDRSRHYRESSSYRSRSRSRSRSRSRSSQAGASPFDRHPTPQRDGNKDKTSAPSNLAKLKDLYGDLSDQKGDAGLERVPRRDNDGEEVFRLGGSTWR

SEQ ID NO: 108 - DNA, 1394 bp, Populus trichocarpa
acaggagtgcttgcatttgtttagtacattatggaggtacagacaaatgggaaaccgatagattcactctttgagaaggtcctttgtatgaacattctatcatcggattacttcaaggagctttaccgattaaagacgtaccatgaagtgattgatgaaatatacaatcaagttgacaatgttgagccatggatgactggtaactgtcgtggcccatctacgtccttttgccttctgtacaagttcttcaccatgaagctcactgtcaaacaaatgcatggtctgctaaagcacaaggattctccttatatcagagcggttgggttcctttacctgagatatgctggtgacccaaagacactgtggaattggtttgaaccatatatcaaagatgatgaggaattttctcctggatctagtggaaggaagacaacaataggcatatatgtgcgtgatttacttctcggacagtactactttgatacccttttcccccgtattcctgttcctgtcttgcggcagatcacagccaatcttgagatgatgaagctacccacaaaaatttctggttcaacaggggatggcaaccgtcatggatctgatgatactgcacgtcgaccaccatctgtgaaggctgcactttcagtctcttttggtcagcgtgctcctcatcgtgcatcaactagggactcatctcctgttcgtcgcacgctaccgccaccctcctatgacagaaccagtgatgatccacgaagtcatcgcagccagagtcgcgaatattctgataaagaatattcagacagggatcgggatcaagataggggtagagagagggaccgtgatagggacagagagagggacagggttcgggatagagatcatgatagagaaagagatcgggaccgtggcagggacagtgacaggaaacaggaacgtgagaggggtagagaccgaaggtctgattacgataggagttccaggtacactgacagggagagcagaagggattatgaacggagcagccgtgatggaagtaggcgtcatagagaaagtaattatagaacccggagtcggagcaggagcagaagtagaagccaaagcttgcaagctggcacatcaccatttgatcagcatccaactcctcaaagggatggaagcaaggataggacatctgcatctagcaatctggctaagctcaaagatctttatggtgatcttggtgatcagaaaggggatgctggcctggaaaggggtcctcggagggacaatgatggtgaagaagtttttagactgggtggttctacttggaggtaggtagttcaatgaaagctgtaactgtctgatgtatcagtaaggtcttcagccatgccaaatcactgtttgagtcaagaaaa

SEQ ID NO: 109 - protein, 427 aa, Populus trichocarpa
MEVQTNGKPIDSLFEKVLCMNILSSDYFKELYRLKTYHEVIDEIYNQVDNVEPWMTGNCRGPSTSFCLLYKFFTMKLTVKQMHGLLKHKDSPYIRAVGFLYLRYAGDPKTLWNWFEPYIKDDEEFSPGSSGRKTTIGIYVRDLLLGQYYFDTLFPRIPVPVLRQITANLEMMKLPTKISGSTGDGNRHGSDDTARRPPSVKAALSVSFGQRAPHRASTRDSSPVRRTLPPPSYDRTSDDPRSHRSQSREYSDKEYSDRDRDQDRGRERDRDRDRERDRVRDRDHDRERDRDRGRDSDRKQERERGRDRRSDYDRSSRYTDRESRRDYERSSRDGSRRHRESNYRTRSRSRSRSRSQSLQAGTSPFDQHPTPQRDGSKDRTSASSNLAKLKDLYGDLGDQKGDAGLERGPRRDNDGEEVFRLGGSTWR

SEQ ID NO: 110 - DNA, 1281 bp, Saccharum officinarum
  misc_feature (1140)..(1141): n is a, c, g, or t
  misc_feature (1220)..(1220): n is a, c, g, or t
cgggctcctttcctccgcctctcgtctagtccctctcctaccgaaccctcccaatccaaagcgattcctccgggccgccgccgtcccgatcgcgccgcgccgccggggcggcgtctccccggctgcccttagctcagctcgcgttccggtggaacagagaagagaggtggggggaatggagatccagtcgtctggccggcccatcgaggggctgatggagaaggtgctgtccgtgaacatcctctcctcggactacttcaaggagctcttcaagtacaagacctaccacgaggtggtcgacgagatctacaaccaggtggaccacgtcgagccctggatgaccggcaactgccgcgggccctcctccgccttctgcctcctctacaagttcttcaccatgaagctcaccgtcaagcagatgcacgggctgctcaagcaccaggactccccctacatcagagctattggattcctctacctgcgatatgttgcagaaccgaagacgctgtggacttggtatgaaccctatatcaaggatgacgaggagtttgcccctggatcaaatggtaaaatgactacaatgggcgtttatgtgcgtgatctcctccttggtcagtactatttcgacagtcttcttccacgagtgcctctcccaattctccgacaggtcactagccatcttgagaagctgaagcttccaacaaagcagtcaggaatgactggggattccaataggcttgaatcaaatgatactgccagaaggcctccttccgtaaaggcttctttgtctgtctcttttggtcagcgtgctccacaccgtgcatacacaagggattcttccccagtccgaagaacattaccttccaaacaggacaaggaaagaagttatgatggtgaccatgcaaaatcgccaccaaggaagcgcagaagtcagagctctgagcgccatcatgactcagagagggaccgttcaaatcgtgatcgtggcaagtacaaggatagggagcatgatcgttatgctcgtgatcacagagaccgggatcatcatcggcagagttattcagatagggatgacgaaaggcgaggccgtgaaaagagggacagggattctgaccgaaagagatattcaagctcccgcanngagcaggagtccagtccgtggcagaactgacggcgacaaacatcgctccagcccaatttgtagggcaccagaatcattncacctggcaaagctaaaggatttatacggtgatgcaacaaacacaaagaatgatgcttgcg

SEQ ID NO: 111 - protein, 331 aa, Saccharum officinarum
  misc_feature (322)..(322): Xaa can be any naturally occurring amino acid
MEIQSSGRPIEGLMEKVLSVNILSSDYFKELFKYKTYHEVVDEIYNQVDHVEPWMTGNCRGPSSAFCLLYKFFTMKLTVKQMHGLLKHQDSPYIRAIGFLYLRYVAEPKTLWTWYEPYIKDDEEFAPGSNGKMTTMGVYVRDLLLGQYYFDSLLPRVPLPILRQVTSHLEKLKLPTKQSGMTGDSNRLESNDTARRPPSVKASLSVSFGQRAPHRAYTRDSSPVRRTLPSKQDKERSYDGDHAKSPPRKRRSQSSERHHDSERDRSNRDRGKYKDREHDRYARDHRDRDHHRQSYSDRDDERRGREKRDRDSDRKRYSSSRXEQESSPWQN

SEQ ID NO: 112 - DNA, 1179 bp, Saccharum officinarum
atggagatccagtcatctgcccggcccatcgaggggctgatggagaaggtgctgtccgtgaacatcctctcctcggactacttcaaggagctcttcaagtacaagacctaccacgaggtggtcgacgagatctacaaccaggtggaccacgtcgagccctggatgaccggcaactgccgcgggccctcctccgccttctgcctcctctacaagttcttcaccatgaagctcaccgtcaagcagatgcacgggctgctcaagcatcaggactccccctacatcagagctattggattcctctacctgcgatatgttgcagaaccgaagacgctgtggacttggtatgaaccctatatcaaggatgacgaggagtttgcccctggatcaaatggtaaattgactacaatgggcgtttatgtgcgtgatctcctccttggtcagtactatttcgacagtcttcttccacgagtgcctctcccaattctccgacaggtcactagccatcttgagaagctgaagcttccaacaaagcagtcaggaatgactggggattccaataggcttgaatcaaatgatactgccagaaggcctccttccgtaaaggcttctttgtctgtctcttttggtcagcgtgctccacaccgtgcatccacaagggattcttccccagtccgaagaacattaccttccaaacaggacaaagaaagaagttatgatggtgaccatgcaaaatcgccaccaaggaagcgcagaagtcagagctctgagcgtcatcatgactctgagagggaccgttcagatcgtgatcgtggcaggtacaagggtagggagcatgatcgttatgctcgtgatcacagagaccgggatcatcatcggcagagttattcagatagggatgacgaaaggcgaggccgtgaaaagagggacagggattctgaccacaatagacattcaagctcccgcaggagcaggagcaggagtccagtccgtggcagaactgacggtgacaagcatcgctccagcccatttggtagggcaccagaatcatccaacctggcaaagctaaaggatttatacggtgatgcaacaaacacaaagaatgatgctggcgatgatagagctcacagggattctggaacggaagaggtaatccgactgggaggggcaaggtggaggtga

SEQ ID NO: 113 - protein, 392 aa, Saccharum officinarum
MEIQSSARPIEGLMEKVLSVNILSSDYFKELFKYKTYHEVVDEIYNQVDHVEPWMTGNCRGPSSAFCLLYKFFTMKLTVKQMHGLLKHQDSPYIRAIGFLYLRYVAEPKTLWTWYEPYIKDDEEFAPGSNGKLTTMGVYVRDLLLGQYYFDSLLPRVPLPILRQVTSHLEKLKLPTKQSGMTGDSNRLESNDTARRPPSVKASLSVSFGQRAPHRASTRDSSPVRRTLPSKQDKERSYDGDHAKSPPRKRRSQSSERHHDSERDRSDRDRGRYKGREHDRYARDHRDRDHHRQSYSDRDDERRGREKRDRDSDHNRHSSSRRSRSRSPVRGRTDGDKHRSSPFGRAPESSNLAKLKDLYGDATNTKNDAGDDRAHRDSGTEEVIRLGGARWR

SEQ ID NO: 114 - DNA, 729 bp, Saccharomyces cerevisiae
atggctgtcaatgaatttcaagtggagtctaacatctctccaaaacaactgaataaccagtcagtgtcacttgttattcctcggttgacaagagataaaattcataattcaatgtactataaagtaaatctaagcaacgaatctttgagaggcaatacaatggtagagcttttgaaagttatgattggcgcatttggtaccataaaaggtcaaaatggtcatttacacatgatggttctcggtggcattgagtttaaatgcatcttaatgaagttaatcgaaatcagaccgaatttccagcagttgaacttcttattgaatgtaaaaaatgagaacggttttgactcgaaatatattattgctttgcttctggtttatgcgcggttacagtattattatttgaatggcaataacaaaaacgatgatgatgaaaatgatttgataaagttatttaaagtacaattatacaaatattcacagcattatttcaaactaaaaagtttcccactacaagtagactgctttgctcactcctataacgaagaactttgtataatacacattgatgaattagtcgattggttggccacacaggaccatatctggggtattccattagggaaatgtcaatggaataaaatatacaactctgatgaagagagtagttctagcgaaagcgaaagtaatggtgacagtgaagatgacaacgacaccagcagcgaatcatag

SEQ ID NO: 115 - protein, 242 aa, Saccharomyces cerevisiae
MAVNEFQVESNISPKQLNNQSVSLVIPRLTRDKIHNSMYYKVNLSNESLRGNTMVELLKVMIGAFGTIKGQNGHLHMMVLGGIEFKCILMKLIEIRPNFQQLNFLLNVKNENGFDSKYIIALLLVYARLQYYYLNGNNKNDDDENDLIKLFKVQLYKYSQHYFKLKSFPLQVDCFAHSYNEELCIIHIDELVDWLATQDHIWGIPLGKCQWNKIYNSDEESSSSESESNGDSEDDNDTSSES

SEQ ID NO: 116 - DNA, 1182 bp, Triticum aestivum
atggcgaaccgcacggacccccgggcccggagcatccacggcaccaaccctcagaacctggtggagaagatcgtgcgggccaagatctaccagagcaactactggaaggagcagtgcttcggcctcacggcggagaccctcgtcgacaaggccatggagctcgactacaccggcggcacccacggcggcaaccgcaggccgacccccttcctctgcctcgctctcaagatgctccagatccagcccgacaaggaaatcgtcgtcgagttcatcaaggacgaggactacaagtatgtccgggttcttggggccttctacctgcgcctcactggcaccgtcgccgacgtttaccagtacctcgagccgctctacaacgactaccgcaagattaggcaaaagctcagcgatggaaaattcacgctgacacacgttgacgaattcattgacgagctcctgaccaaggactatagctgcggcactgccctcccccgcattcagaaaagatggatccttgaagcttctggaactctagaacctagaagaagtgcacttgaagacgattttgaggaagaggaggaagataaggaggatggacagcctatggacgtagatgagcctaacactcatgaaaaggaccatcttcgtggaagaagccccaccaaagaacgcgacagggaaagggagagggacagagacaggaaacacgaaaggcatcacagggaccgagatcatgacagagatcgggatcacgacagggactatggaagaggccgggaaagagatcgagacagagatagaggccgtgaaagagatagagagagggatagggaacgagaccgtcaccgcatccgagatgacgactaccaccgagatcgagaccgggatggcagggaaagggaacgccgggacagagaccgtggcaggcacaggagccgctcagggagcagaagccgggatcggcgtgaaagagaccgtgaagtgggagagctccgtaagaggcgtggccgtggtagtgccagtcctcctcgggggcgtgccgaggatggtccgagggaggagcctaagaagagaaaggaaaagaaagagaagaagggcagcgggaacggtccagatcctaatgatccagagattatagagatgaacaagctgcgtgcatcgatagggttgggaccactgaagtag

SEQ ID NO: 117 - protein, 393 aa, Triticum aestivum
MANRTDPRARSIHGTNPQNLVEKIVRAKIYQSNYWKEQCFGLTAETLVDKAMELDYTGGTHGGNRRPTPFLCLALKMLQIQPDKEIVVEFIKDEDYKYVRVLGAFYLRLTGTVADVYQYLEPLYNDYRKIRQKLSDGKFTLTHVDEFIDELLTKDYSCGTALPRIQKRWILEASGTLEPRRSALEDDFEEEEEDKEDGQPMDVDEPNTHEKDHLRGRSPTKERDRERERDRDRKHERHHRDRDHDRDRDHDRDYGRGRERDRDRDRGRERDRERDRERDRHRIRDDDYHRDRDRDGRERERRDRDRGRHRSRSGSRSRDRRERDREVGELRKRRGRGSASPPRGRAEDGPREEPKKRKEKKEKKGSGNGPDPNDPEIIEMNKLRASIGLGPLK

SEQ ID NO: 118 - DNA, 1119 bp, Vitis vinifera
atggcgaaccgtacggacccagcggcgaagagcatacgaggcacgaatccgcaaaacttggtggagaagattctgaggtcgaagatttaccagaacacgtactggaaggagcagtgctttggattgaccgcggagactctggttgacaaggccatggagctcgaccacctcggcggcacctttggtggtaaccgcaagcccacgcccttcatgtgcctcgtcatgaaaatgctccagatccagcccgagaaggacatcgtcgtcgagttcataaaaaacgaagagtacaaatatgtccgaatacttggtgcattttatttgcgtcttacagggatagatactgatgtgtaccaatacctagagcctctatacaatgactatcggaaattgaggagaaaattatctgatggaaattattctttgacacacgttgatgaggttatcgatgaacttctgacaaaagattattcctgtgacgttgccttgccccgtatcaagaaaagatggactcttgaatcccttggtacactggaaccaagaagaagtgctttggaagatgattttgaggaagaggaagaaaaagaagaggatgaccaactcatggatgaattagatgttggggctcatgaaaaggattattatcgtgggcgaagccctgcaagggagagagatagggatagaaagcgtgacagtcacagatatagagatcgagattatgatagggaacgtggaagaggacgagaaagagatcgggaaagggaaagggacagagacagctatagagacagggagagggagagggacagagacagggaccgctatcgtctgagagatgataaagaatatggtcgtgacagggagagggaaagggagagggaaggcagggagagggagaggcgagacagggaccgagccattcaaggagccgaagtaggagcaaggatcaggcatgctcgcagcagcaccaacatgccagaggatggaaccactcgagaagagccaaggaagaagaaagaaaagaaggagaagaaggatgatggcactgaccacccagatccagagattgcagaagcaaacaggttgcgggcatcccttgggcttaaacccttgaaactctaa

SEQ ID NO: 119 - protein, 372 aa, Vitis vinifera
MANRTDPAAKSIRGTNPQNLVEKILRSKIYQNTYWKEQCFGLTAETLVDKAMELDHLGGTFGGNRKPTPFMCLVMKMLQIQPEKDIVVEFIKNEEYKYVRILGAFYLRLTGIDTDVYQYLEPLYNDYRKLRRKLSDGNYSLTHVDEVIDELLTKDYSCDVALPRIKKRWTLESLGTLEPRRSALEDDFEEEEEKEEDDQLMDELDVGAHEKDYYRGRSPARERDRDRKRDSHRYRDRDYDRERGRGRERDRERERDRDSYRDRERERDRDRDRYRLRDDKEYGRDREREREREGRERERRDRDRAIQGAEVGARIRHARSSTNMPEDGTTREEPRKKKEKKEKKDDGTDHPDPEIAEANRLRASLGLKPLKL

SEQ ID NO: 120 - protein, 33 aa, Artificial sequence
  Conserved Motif I of a PRP38 polypeptide
RRPPSVKASLSVSFGQRAPHRASTRDSSPVRRT

SEQ ID NO: 121 - protein, 14 aa, Artificial sequence
  Conserved Motif II of a PRP38 polypeptide
  VARIANT (7)..(7): Xaa can be Ile or Val
SPYIRAXGFLYLRY

SEQ ID NO: 122 - protein, 8 aa, Artificial sequence
  Conserved Motif III of a PRP38 polypeptide
KLKDLYGD

SEQ ID NO: 123 - protein, 6 aa, Artificial sequence
  Conserved Motif IV of a PRP38 polypeptide
  VARIANT (1)..(1): Xaa can be Leu or Asn
  UNSURE (2)..(2): Xaa can be any naturally occurring amino acid
  VARIANT (4)..(4): Xaa can be Lys or Asn
XXEXVL

SEQ ID NO: 124 - protein, 5 aa, Artificial sequence
  Conserved Motif V of a PRP38 polypeptide
LVEKI

SEQ ID NO: 125 - DNA, 55 bp, Artificial sequence
  primer 1
ggggacaagtttgtacaaaaaagcaggcttaaacaatggcggagatacagtcaaa

SEQ ID NO: 126 - DNA, 48 bp, Artificial sequence
  primer 2
ggggaccactttgtacaagaaagctgggttcacctccaagaggaacca

SEQ ID NO: 127 - DNA, 2194 bp, Oryza sativa; identical to SEQ ID NO: 75

SEQ ID NO: 128 - DNA, 1062 bp, Oryza sativa
atgtctactatctacatgagccagctacctgctactctccctctaatggagggggatcaggatcaggggctctacccagccttccatagagcaaaggaccctcctatcttgttccctttcatgatcgacagcgccgtcgagcaccaagggcaaatctatggagatcagggcttgaggaggcagcaggttttgggtgaatccaatcaacagttcaatgatcacatgatgatgggcggatcagatgtcttcctcacaccgtctccgttccgaccaaccatccaaagcatcggcagcgacatgatccagcgatcatcttatgatccatacgatatcgagagtaacaacaagcagcatgccaatggatcaaccagcaagtggatgtcgacgccgccaatgaagatgaggatcataaggaagggggcggcaaccgatcctgagggcggggcggtgagaaagccaaggagaagagcacaagcgcaccaggatgagagccagcaacaactgcagcaagctttgggtgtcgttagagtgtgctcggactgcaacaccaccaagacccccttgtggagaagtggtccttgtggccccaagtccctttgcaacgcgtgtggcatcaggcaaaggaaggcgcggcgggcgatggccgctgctgccaacggcggagcggcggtggcgccggcaaagagcgtggccgcggcgccggtgaacaataagccggcggcgaagaaggagaagagggcggcggacgtcgaccggtcgctgccgttcaagaaacggtgcaagatggtcgatcacgttgctgctgccgtcgctgccaccaagcccacggctgctggagaagtagtggccgccgctccgaaggaccaagatcacgtcatcgtcgtcggtggcgagaacgccgccgccacctccatgccggcacagaacccgatatccaaggcggcggcgaccgccgctgccgccgccgcctctccggcgttcttccacggcctccctcgcgacgagatcaccgacgccgccatgctgctcatgaccctatcctgtggcctcgtccacagctag

SEQ ID NO: 129 - protein, 353 aa, Oryza sativa
MSTIYMSQLPATLPLMEGDQDQGLYPAFHRAKDPPILFPFMIDSAVEHQGQIYGDQGLRRQQVLGESNQQFNDHMMMGGSDVFLTPSPFRPTIQSIGSDMIQRSSYDPYDIESNNKQHANGSTSKWMSTPPMKMRIIRKGAATDPEGGAVRKPRRRAQAHQDESQQQLQQALGVVRVCSDCNTTKTPLWRSGPCGPKSLCNACGIRQRKARRAMAAAANGGAAVAPAKSVAAAPVNNKPAAKKEKRAADVDRSLPFKKRCKMVDHVAAAVAATKPTAAGEVVAAAPKDQDHVIVVGGENAAATSMPAQNPISKAAATAAAAAASPAFFHGLPRDEITDAAMLLMTLSCGLVHS

SEQ ID NO: 130 - protein, 16 aa, Artificial sequence
  Conserved Motif 1 of GATA domain
  VARIANT (2)..(2): Xaa can be Ser,  Ala, or Thr
  VARIANT (3)..(3): Xaa can be Asp, Glu, or Asn
  UNSURE (5)..(5): Xaa can be any naturally occurring amino acid, preferably one of Asn, Lys, Gly, His, Asp
  VARIANT (7)..(7): Xaa can be Thr, Ser, or Ala
  VARIANT (8)..(8): Xaa can be Lys or Ser
  VARIANT (11)..(11): Xaa can be Leu or Met
  VARIANT (14)..(14): Xaa can be Ser, Gly, or Asn
CXXCXTXXTPXWRXGP

SEQ ID NO: 131 - protein, 15 aa, Artificial sequence
  Conserved Motif 2 of GATA domain
  UNSURE (13)..(13): Xaa can be any naturally occurring amino acid, preferably one of Gln, His, Asn, Ser, Tyr, Phe
  VARIANT (14)..(14): Xaa can be Arg or Lys
GPKSLCNACGIRXXK

SEQ ID NO: 132 - protein, 9 aa, Artificial sequence
  Conserved Motif 3 of a GATA-like polypeptide
  VARIANT (1)..(1): Xaa can be Ala or Ser
  VARIANT (2)..(2): Xaa can be Ala or Trp
  UNSURE (3)..(3): Xaa can be any naturally occurring amino acid, preferably one of Met, Leu, Val, Ile, Arg
  VARIANT (4)..(4): Xaa can be Leu or Cys
  VARIANT (5)..(5): Xaa can be Leu or Asn
  VARIANT (6)..(6): Xaa can be Met, Leu, or Val
  VARIANT (7)..(7): Xaa can be Thr, Leu, or Ala
  VARIANT (8)..(8): Xaa can be Leu or Asp
  VARIANT (9)..(9): Xaa can be Ser or Arg
XXXXXXXXX

SEQ ID NO: 133 - DNA, 58 bp, Artificial sequence
  primer: prm10133
ggggacaagtttgtacaaaaaagcaggcttaaacaatgtctactatctacatgagcca

SEQ ID NO: 134 - DNA, 50 bp, Artificial sequence
  primer: prm10134
ggggaccactttgtacaagaaagctgggtagctagctagttttgatcagc

SEQ ID NO: 135 - DNA, 2194 bp, Oryza sativa; identical to SEQ ID NO: 75

SEQ ID NO: 136 - DNA, 3308 bp, Artificial sequence
  expression cassette
aatccgaaaagtttctgcaccgttttcaccccctaactaacaatatagggaacgtgtgctaaatataaaatgagaccttatatatgtagcgctgataactagaactatgcaagaaaaactcatccacctactttagtggcaatcgggctaaataaaaaagagtcgctacactagtttcgttttccttagtaattaagtgggaaaatgaaatcattattgcttagaatatacgttcacatctctgtcatgaagttaaattattcgaggtagccataattgtcatcaaactcttcttgaataaaaaaatctttctagctgaactcaatgggtaaagagagagattttttttaaaaaaatagaatgaagatattctgaacgtattggcaaagatttaaacatataattatataattttatagtttgtgcattcgtcatatcgcacatcattaaggacatgtcttactccatcccaatttttatttagtaattaaagacaattgacttatttttattatttatcttttttcgattagatgcaaggtacttacgcacacactttgtgctcatgtgcatgtgtgagtgcacctcctcaatacacgttcaactagcaacacatctctaatatcactcgcctatttaatacatttaggtagcaatatctgaattcaagcactccaccatcaccagaccacttttaataatatctaaaatacaaaaaataattttacagaatagcatgaaaagtatgaaacgaactatttaggtttttcacatacaaaaaaaaaaagaattttgctcgtgcgcgagcgccaatctcccatattgggcacacaggcaacaacagagtggctgcccacagaacaacccacaaaaaacgatgatctaacggaggacagcaagtccgcaacaaccttttaacagcaggctttgcggccaggagagaggaggagaggcaaagaaaaccaagcatcctcctcctcccatctataaattcctccccccttttcccctctctatataggaggcatccaagccaagaagagggagagcaccaaggacacgcgactagcagaagccgagcgaccgccttcttcgatccatatcttccggtcgagttcttggtcgatctcttccctcctccacctcctcctcacagggtatgtgcccttcggttgttcttggatttattgttctaggttgtgtagtacgggcgttgatgttaggaaaggggatctgtatctgtgatgattcctgttcttggatttgggatagaggggttcttgatgttgcatgttatcggttcggtttgattagtagtatggttttcaatcgtctggagagctctatggaaatgaaatggtttagggtacggaatcttgcgattttgtgagtaccttttgtttgaggtaaaatcagagcaccggtgattttgcttggtgtaataaaagtacggttgtttggtcctcgattctggtagtgatgcttctcgatttgacgaagctatcctttgtttattccctattgaacaaaaataatccaactttgaagacggtcccgttgatgagattgaatgattgattcttaagcctgtccaaaatttcgcagctggcttgtttagatacagtagtccccatcacgaaattcatggaaacagttataatcctcaggaacaggggattccctgttcttccgatttgctttagtcccagaattttttttcccaaatatcttaaaaagtcactttctggttcagttcaatgaattgattgctacaaataatgcttttatagcgttatcctagctgtagttcagttaataggtaatacccctatagtttagtcaggagaagaacttatccgatttctgatctccatttttaattatatgaaatgaactgtagcataagcagtattcatttggattattttttttattagctctcaccccttcattattctgagctgaaagtctggcatgaactgtcctcaattttgttttcaaattcacatcgattatctatgcattatcctcttgtatctacctgtagaagtttctttttggttattccttgactgcttgattacagaaagaaatttatgaagctgtaatcgggatagttatactgcttgttcttatgattcatttcctttgtgcagttcttggtgtagcttgccactttcaccagcaaagttcatttaaatcaactagggatatcacaagtttgtacaaaaaagcaggcttaaacaatgtctactatctacatgagccagctacctgctactctccctctaatggagggggatcaggatcaggggctctacccagccttccatagagcaaaggaccctcctatcttgttccctttcatgatcgacagcgccgtcgagcaccaagggcaaatctatggagatcagggcttgaggaggcagcaggttttgggtgaatccaatcaacagttcaatgatcacatgatgatgggcggatcagatgtcttcctcacaccgtctccgttccgaccaaccatccaaagcatcggcagcgacatgatccagcgatcatcttatgatccatacgatatcgagagtaacaacaagcagcatgccaatggatcaaccagcaagtggatgtcgacgccgccaatgaagatgaggatcataaggaagggggcggcaaccgatcctgagggcggggcggtgagaaagccaaggagaagagcacaagcgcaccaggatgagagccagcaacaactgcagcaagctttgggtgtcgttagagtgtgctcggactgcaacaccaccaagacccccttgtggagaagtggtccttgtggccccaagtccctttgcaacgcgtgtggcatcaggcaaaggaaggcgcggcgggcgatggccgctgctgccaacggcggagcggcggtggcgccggcaaagagcgtggccgcggcgccggtgaacaataagccggcggcgaagaaggagaagagggcggcggacgtcgaccggtcgctgccgttcaagaaacggtgcaagatggtcgatcacgttgctgctgccgtcgctgccaccaagcccacggctgctggagaagtagtggccgccgctccgaaggaccaagatcacgtcatcgtcgtcggtggcgagaacgccgccgccacctccatgccggcacagaacccgatatccaaggcggcggcgaccgccgctgccgccgccgcctctccggcgttcttccacggcctccctcgcgacgagatcaccgacgccgccatgctgctcatgaccctatcctgtggcctcgtccacagctag

SEQ ID NO: 137 - DNA, 1044 bp, Oryza sativa
atgtctactatctacatgagccagctacctgctactctccctctaatggagggggatcaggatcaggggctctacccagccttccatagagcaaaggaccctcctatcttgttccctttcatgatcgacagcgccgtcgagcaccaagggcaaatctatggagatcagggcttgaggaggcagcaggttttgggtgaatccaatcaacagttcaatgatcacatgatgatgggcggatcagatgtcttcctcacaccgtctccgttccgaccaaccatccaaagcatcggcagtgacatgatccagcgatcatcttatgatccatacgatatcgagagtaacaacaagcagcatgccaatggatcaaccagcaagtggatgtcgacgccgccaatgaagatgaggatcataaggaagggggcggcaaccgatcctgagggcggggcggtgagaaagccaaggagaagagcacaagcgcaccaggatgagagccagcaacaactgcagcaagctttgggtgtcgttagagtgtgctcggactgcaacaccaccaagacccccttgtggagaagtggtccttgtggccccaagtccctttgcaacgcgtgtggcatcaggcaaaggaaggcgcggcgggcgatggccgctgctgccaacggcggagcggcggtggcgccggcaaagagcgtggccgcggcgccggtgaacaataagccggcggcgaagaaggagaagagggcggcggacgtcgaccggtcgctgccgttcaagaaacggtgcaagatggtcgatcacgttgctgctgccgtcgctgccaccaagcccacggctgctggagaagtagtggccgccgctccgaaggaccaagatcacgtcatcgtcgtcggtggcgagaacgccgccgccacctccatgccggcacagaacccgatatccaaggcggcggcggcctctccggcgttcttccacggcctccctcgcgacgagatcaccgacgccgccatgctgctcatgaccctatcctgtggcctcgtccacagctag

SEQ ID NO: 138 - protein, 347 aa, Oryza sativa
MSTIYMSQLPATLPLMEGDQDQGLYPAFHRAKDPPILFPFMIDSAVEHQGQIYGDQGLRRQQVLGESNQQFNDHMMMGGSDVFLTPSPFRPTIQSIGSDMIQRSSYDPYDIESNNKQHANGSTSKWMSTPPMKMRIIRKGAATDPEGGAVRKPRRRAQAHQDESQQQLQQALGVVRVCSDCNTTKTPLWRSGPCGPKSLCNACGIRQRKARRAMAAAANGGAAVAPAKSVAAAPVNNKPAAKKEKRAADVDRSLPFKKRCKMVDHVAAAVAATKPTAAGEVVAAAPKDQDHVIVVGGENAAATSMPAQNPISKAAAASPAFFHGLPRDEITDAAMLLMTLSCGLVHS

SEQ ID NO: 139 - DNA, 1065 bp, Oryza sativa
atgtctactatctacatgagccagctacctgctactctccctctaatggagggggatcaggatcaggggctctacccagccttccatagagcaaaggaccctcctatcttgttccctttcatgatcgacagcgccgtcgagcaccaagggcaaatctatggagatcagggcttgaggaggcagcaggttttgggtgaatccaatcaacagttcaatgatcacatgatgatgggcggatcagatgtcttcctcacaccgtctccgttccgaccaaccatccaaagcatcggcagcgacatgatccagcgatcatcttatgatccatacgatatcgagagtaacaacaagcagcatgccaatggatcaaccagcaagtggatgtcgacgccgccaatgaagatgaggatcataaggaagggggcggcaaccgatcctgagggcggggcggtgagaaagccaaggagaagagcacaagcgcaccaggatgagagccagcaacaactgcagcaagctttgggtgtcgttagagtgtgctcggactgcaacaccaccaagacccccttgtggagaagtggtccttgtggccccaagtccctttgcaacgcgtgtggcatcaggcaaaggaaggcgcggcgggcgatggccgctgctgccaacgggcggagcggccggtggcgccggcaaagaggcgtggccgcggcgccggtgaacaataagccggcggcgaagaaggagaagagggcggcggacgtcgaccggtcgctgccgttcaagaaacggtgcaagatggtcgatcacgttgctgctgccgtcgctgccaccaagcccacggctgctggagaagtagtggccgccgctccgaaggaccaagatcacgtcatcgtcgtcggtggcgagaacgccgccgccacctccatgccggcacagaacccgatatccaaggcggcggcgaccgccgctgccgccgccgcctctccggcgttcttccacggcctccctcgcgacgagatcaccgacgccgccatgctgctcatgaccctatcctgtggcctcgtccacagctag

SEQ ID NO: 140 - protein, 354 aa, Oryza sativa
MSTIYMSQLPATLPLMEGDQDQGLYPAFHRAKDPPILFPFMIDSAVEHQGQIYGDQGLRRQQVLGESNQQFNDHMMMGGSDVFLTPSPFRPTIQSIGSDMIQRSSYDPYDIESNNKQHANGSTSKWMSTPPMKMRIIRKGAATDPEGGAVRKPRRRAQAHQDESQQQLQQALGVVRVCSDCNTTKTPLWRSGPCGPKSLCNACGIRQRKARRAMAAAANGRSGRWRRQRGVAAAPVNNKPAAKKEKRAADVDRSLPFKKRCKMVDHVAAAVAATKPTAAGEVVAAAPKDQDHVIVVGGENAAATSMPAQNPISKAAATAAAAAASPAFFHGLPRDEITDAAMLLMTLSCGLVHS

SEQ ID NO: 141 - DNA, 1128 bp, Oryza sativa
atggagggggagcaccaccatcaccaccaggatcatcaccaaggccacttccaagccttctccctgcagcctaaggatcccccagtcttattcccctttgtgatcagtagaagaagcagcagcagcagccctagcgacagcaccactctaagctatggttcagaccatcacttgacacagcagcagcagcatcagcatcaagccatgcttgagccccaaaatatgattggaggatcatccgctggcatctttgcgacgccgttcccgaccgtcaagagcatccgcgacgacatgatcgagcggtcgcagttcgatccatacgataccgagaagctgcaggcgagctgcgggttagccaaggtcgtcgccggcggcaagtggagcgcggtgccagcggccaagatgaagatcacgaggaagatgggtgagccgtcgtccggtgtcactggcggggctgcgacgacggtggcgccgaagaagccgaggaggaggccggcgcaggcgtacgaggatcacggccatggcggcgccatgggccaagcttttggcgtgattagggtgtgctccgactgcaacaccaccaagactcccttgtggaggagtggcccgtgcggccccaagtcgctttgcaacgcgtgcggcatcaggcagaggaaggcgcggcgggcgatgatggcctccggactaccagcgtcccccaacgccgccggccccaaggcggccgcacatagcggcgccgctgcggtggcggctgcgcagccgaaggtgaagaaggagaagagagccgacgtcgaccggtcgtcgctgccgttcaagaaacggtgcaaggtcgtccaggtcgaggatcatcaaacgctgcccgccgccacaaacgcagccgccgcagctgccatggaggagacggccgagtccgccaccgtcgccccgcccccggcgccgacgacgaggggtggtactctcgtcgacagcatcgggctcagctggagcaagacccatgccgccgccaccgcctcctgcagcttccggccgtcaccggtggctcccggcttcgcggcggcggtgcaggacgagatcactgacgccgccatgctgctcatgacgctgtcctgcgggcttgtccggagctga

SEQ ID NO: 142 - protein, 375 aa, Oryza sativa
MEGEHHHHHQDHHQGHFQAFSLQPKDPPVLFPFVISRRSSSSSPSDSTTLSYGSDHHLTQQQQHQHQAMLEPQNMIGGSSAGIFATPFPTVKSIRDDMIERSQFDPYDTEKLQASCGLAKVVAGGKWSAVPAAKMKITRKMGEPSSGVTGGAATTVAPKKPRRRPAQAYEDHGHGGAMGQAFGVIRVCSDCNTTKTPLWRSGPCGPKSLCNACGIRQRKARRAMMASGLPASPNAAGPKAAAHSGAAAVAAAQPKVKKEKRADVDRSSLPFKKRCKVVQVEDHQTLPAATNAAAAAAMEETAESATVAPPPAPTTRGGTLVDSIGLSWSKTHAAATASCSFRPSPVAPGFAAAVQDEITDAAMLLMTLSCGLVRS

SEQ ID NO: 143 - DNA, 1119 bp, Oryza sativa
atggagggggagcaccaccaggatcatcaccaaggccacttccaagccttctccctgcagcctaaggatcccccagtcttattcccctttgtgatcaatagaagaagcagcagcagcagccctagcgacagcaccactctaagctatggttcagaccatcacttgacacagcagcagcagcatcagcatcaagccatgcttgagccccaacatatgattggaggatcatccgctggcatctttgcgacgccgttcccgaccgtcaagagcatccgcgacgacatgatcgagcggtcgcagttcgatccatacgataccgagaagctgcaggcgagctgcgggttagccaaggtcgtcgccggcggcaagtggagcgcggtgccagcggccaagatgaagatcacgaggaagatgggtgagccgtcgtccggtgtcactggcggggctgcgacgacggtggcgccgaagaagccgaggaggaggctggcgcaggcgtacgaggatcacggccatggcggcgccatgggccaagcttttggcgtgattagggtgtgctccgactgcaacaccaccaagactcccttgtggaggagtggcccgtgcggccccaagtcgctttgcaacgcgtgcggcatcaggcagaggaaggcgcggcgggcgatgatggcctccggactaccagcgtcccccaacgccgccggccccaaggcggccgcacatagcggcgccgctgcggtggcggctgcgcagccgaaggtgaagaaggagaagagagccgacgtcgaccggtcgtcgctgccgttcaagaaacggtgcaaggccgtccaggtcgaggatcatcaaacgctgcccgccgccacaaacgcagccgccgcagctgccatggaggagacggccgagtccgccaccgtcgccccgcccccggcgccgacgacgaggggttgtactctcgtcgacagcatcgggctcagctggagcaagacccatgccgccgccaccgcctcctgcagcttccggccgtcaccggtggctcccggcttcgcggcggcggtgcaggacgagatcactgacgccgccatgctgctcatgacgctgtcctgcgggcttgtccggagctga

SEQ ID NO: 144 - protein, 372 aa, Oryza sativa
MEGEHHQDHHQGHFQAFSLQPKDPPVLFPFVINRRSSSSSPSDSTTLSYGSDHHLTQQQQHQHQAMLEPQHMIGGSSAGIFATPFPTVKSIRDDMIERSQFDPYDTEKLQASCGLAKVVAGGKWSAVPAAKMKITRKMGEPSSGVTGGAATTVAPKKPRRRLAQAYEDHGHGGAMGQAFGVIRVCSDCNTTKTPLWRSGPCGPKSLCNACGIRQRKARRAMMASGLPASPNAAGPKAAAHSGAAAVAAAQPKVKKEKRADVDRSSLPFKKRCKAVQVEDHQTLPAATNAAAAAAMEETAESATVAPPPAPTTRGCTLVDSIGLSWSKTHAAATASCSFRPSPVAPGFAAAVQDEITDAAMLLMTLSCGLVRS

SEQ ID NO: 145 - DNA, 1044 bp, Oryza sativa
atgtctaccatctacatgagtcagctctcagctgctctccctctcatggagggggagcaccaccatcaccaccaggatcatcaccaaggccacttccaagccttctccctgcagcctaaggatcccccagtcttattcccctttgtgatcagtagaagaagcagcagcagcagccctagcgacagcaccactctaagctatggttcagaccatcacttgacacagcagcagcagcatcagcatcaagccatgcttgagccccaaaatatgattggaggatcatccgctggcatctttgcgacgccgttcccgaccgtcaagagcatccgcgacgacatgatcgagcggtcgcagttcgatccatacgataccgagaagctgcaggcgagctgcgggttagccaaggtcgtcgccggcggcaagtggagcgcggtgccagcggccaagatgaagatcacgaggaagatgggtgagccgtcgtccggtgtcactggcggggctgcgacgacggtggcgccgaagaagccgaggaggaggccggcgcaggcgtacgaggatcacggccatggcggcgccatgggccaagcttttggcgtgattagggtgtgctccgactgcaacaccaccaagactcccttgtggaggagtggcccgtgcggccccaagtcgctttgcaacgcgtgcggcatcaggcagaggaaggcgcggcgggcgatgatggcctccggactaccagcgtcccccaacgccgccggccccaaggcggccgcacatagcggcgccacaaacgcagccgccgcagctgccatggaggagacggccgagtccgccaccgtcgccccgcccccggcgccgacgacgaggggtggtactctcgtcgacagcatcgggctcagctggagcaagacccatgccgccgccaccgcctcctgcagcttccggccgtcaccggtggctcccggcttcgcggcggcggtgcaggacgagatcactgacgccgccatgctgctcatgacgctgtcctgcgggcttgtccggagctga

SEQ ID NO: 146 - protein, 347 aa, Oryza sativa
MSTIYMSQLSAALPLMEGEHHHHHQDHHQGHFQAFSLQPKDPPVLFPFVISRRSSSSSPSDSTTLSYGSDHHLTQQQQHQHQAMLEPQNMIGGSSAGIFATPFPTVKSIRDDMIERSQFDPYDTEKLQASCGLAKVVAGGKWSAVPAAKMKITRKMGEPSSGVTGGAATTVAPKKPRRRPAQAYEDHGHGGAMGQAFGVIRVCSDCNTTKTPLWRSGPCGPKSLCNACGIRQRKARRAMMASGLPASPNAAGPKAAAHSGATNAAAAAAMEETAESATVAPPPAPTTRGGTLVDSIGLSWSKTHAAATASCSFRPSPVAPGFAAAVQDEITDAAMLLMTLSCGLVRS

SEQ ID NO: 147 - DNA, 363 bp, Arabidopsis thaliana
atggatccaaggaagctactatcttgttcatcctcttacgtgtcagtgagaatgaaagaagagaaggggacaattaggtgttgcagtgagtgtaagaccaccaagacaccaatgtggagaggtggaccaactggtcctaagtcactttgcaatgcatgtggaattagacacagaaaacagagacgatcagagttattgggtattcatattattcgcagccacaaaagcttagcctccaagaagataaacctattatcatcatcacacggtggcgtggcggtgaagaaacgaaggagtctaaaggaggaagaacaagctgctttgtgtctattgttattgtcttgtagctctgttttggcctga

SEQ ID NO: 148 - protein, 120 aa, Arabidopsis thaliana
MDPRKLLSCSSSYVSVRMKEEKGTIRCCSECKTTKTPMWRGGPTGPKSLCNACGIRHRKQRRSELLGIHIIRSHKSLASKKINLLSSSHGGVAVKKRRSLKEEEQAALCLLLLSCSSVLA

SEQ ID NO: 149 - DNA, 1653 bp, Arabidopsis thaliana
atggagcgatctcgctcagaaacgccatcgtctcgctcacgattgaagctgtgcttcataaactcgccgccatcatcgatattcacggggtccaagatcgaagctgaggatggttctccgcttgtgatcgagctcgtggacgccaccacaaacactctagttagtacgggaccgttctcgtcttctcgggtcgagctcgtgccgctgaacgctgatttcacggaagaaagctggaccgttgagggatttaatcggaatattctcacgcaacgtgaagggaaacgtccgttgctcactggagacctaacggtgatgcttaaaaacggtgttggagttataaccggagatatagctttctcggataactcgagctggactaggagtcggaagttccggttaggtgctaagttgaccggagatggagccgtggaggcgagaagtgaagcttttggatgtagagaccaacgaggagaatgggtctcaaagaaaacatggaacacaattgtatcacatgccatggattgcgttttggacgaaacagagtgttacatttacaatgcaaacactccgggcgtaacacttctcttcaactctgtttatgagttgataagagtgtcattcaatggcaacgatatccaaaaccttgatcagccaattctagaccaattaaaggccgaagcttatcaaaaccttaaccgcattacagcggttaacgataggacctttgtgggtcatccacaaaggtccttacagtgcccgcaagatcctggatttgtcgtaacatgttctggatcgcagcacatcgactttcaaggaagtttggatccatcaagctcttcgatggctctttgccacaaagcttcaagctcaacggtccaccctgatgtcctgatgagttttgataactcatcaaccgcgaggtttcatatcgacaaaaagttcttaccgactttcggaaacagcttcaaagtaagtgaactcgatcaagtacacggaaaatcacaaactgttgtgacaaaaggttgtatagagaataacgaggaggatgagaacgcgttttcttatcatcaccatgatgacatgacctcaagctggtcacctggtacgcaccaagccgttgaaacgatgtttcttaccgtgtctgagacggaagaagctggaatgttcgatgttcattttgcaaacgttaatttgggatctccaagagccaggtggtgtaaggttaaggcagctttcaaggttagggcagcttttaaggaagtccggagacacacaactgccagaaatccgagggaaggcttgaagctactatcttgttcatcctcttacgtgtcagtgagaatgaaagaagagaaggggacaattaggtgttgcagtgagtgtaagaccaccaagacaccaatgtggagaggtggaccaactggtcctaagtcactttgcaatgcatgtggaattagacacagaaaacagagacgatcagagttattgggtattcatattattcgcagccacaaaagcttagcctccaagaagataaacctattatcatcatcacacggtggcgtggcggtgaagaaacgaaggagtctaaaggaggaagaacaagctgctttgtgtctattgttattgtcttgtagctctgttttggcctaa

SEQ ID NO: 150 - protein, 550 aa, Arabidopsis thaliana
MERSRSETPSSRSRLKLCFINSPPSSIFTGSKIEAEDGSPLVIELVDATTNTLVSTGPFSSSRVELVPLNADFTEESWTVEGFNRNILTQREGKRPLLTGDLTVMLKNGVGVITGDIAFSDNSSWTRSRKFRLGAKLTGDGAVEARSEAFGCRDQRGEWVSKKTWNTIVSHAMDCVLDETECYIYNANTPGVTLLFNSVYELIRVSFNGNDIQNLDQPILDQLKAEAYQNLNRITAVNDRTFVGHPQRSLQCPQDPGFVVTCSGSQHIDFQGSLDPSSSSMALCHKASSSTVHPDVLMSFDNSSTARFHIDKKFLPTFGNSFKVSELDQVHGKSQTVVTKGCIENNEEDENAFSYHHHDDMTSSWSPGTHQAVETMFLTVSETEEAGMFDVHFANVNLGSPRARWCKVKAAFKVRAAFKEVRRHTTARNPREGLKLLSCSSSYVSVRMKEEKGTIRCCSECKTTKTPMWRGGPTGPKSLCNACGIRHRKQRRSELLGIHIIRSHKSLASKKINLLSSSHGGVAVKKRRSLKEEEQAALCLLLLSCSSVLA

SEQ ID NO: 151 - DNA, 363 bp, Arabidopsis thaliana
atggatccaaggaagctactatcttgttcatcctcttacgtgtcagtgagaatgaaagaagagaaggggacaattaggtgttgcagtgagtgtaagaccaccaagacaccaatgtggagaggtggaccaactggtcctaagtcactttgcaatgcatgtggaattagacacagaaaacagagacgatcagagttattgggtattcatattattcgcagccacaaaagcttagcctccaagaagataaacctattatcatcatcacacggtggcgtggcggtgaagaaacgaaggagtctaaaggaggaagaacaagctgctttgtgtctattgttattgtcttgtagctctgttttggccgga

SEQ ID NO: 152 - protein, 121 aa, Arabidopsis thaliana
MDPRKLLSCSSSYVSVRMKEEKGTIRCCSECKTTKTPMWRGGPTGPKSLCNACGIRHRKQRRSELLGIHIIRSHKSLASKKINLLSSSHGGVAVKKRRSLKEEEQAALCLLLLSCSSVLAG

SEQ ID NO: 153 - DNA, 363 bp, Arabidopsis thaliana
atggatccaaggaagctactatcttgttcatcctcttacgtgtcaatgagaatgaaagaagagaaggggacaattaggtgttgcagtgagtgtaagaccaccaagacaccaatgtggagaggtggaccaactggtcctaagtcactttgcaatgcatgtggaattagacacagaaaacagagacgatcagagttattgggtattcatattattcgcagccacaaaagcttagcctccaagaagataaacctattatcatcatcacacggtggcgtggcggtgaagaaacgaaggagtctaaaggaggaagaacaagctgctttgtgtctattgttattgtcttgtagctctgttttggcctaa

SEQ ID NO: 154 - protein, 120 aa, Arabidopsis thaliana
MDPRKLLSCSSSYVSMRMKEEKGTIRCCSECKTTKTPMWRGGPTGPKSLCNACGIRHRKQRRSELLGIHIIRSHKSLASKKINLLSSSHGGVAVKKRRSLKEEEQAALCLLLLSCSSVLA

SEQ ID NO: 155 - DNA, 1197 bp, Arabidopsis thaliana
atggattcaaattttcattactcgatagatcttaacgaagatcaaaaccatcacgaacaaccctttttctatcctcttggatcctcttcctcgcttcatcatcatcatcatcatcatcatcatcaagtcccttctaattcttcatcttcttcttcgtccatttcatcgctctcctcttacctccctttcttgatcaactctcaagaagatcaacatgttgcctacaacaacacttatcacgctgatcatctccatctttctcaacccctcaaggccaagatgtttgtggctaacggtggatcatcagcatgcgatcacatggtgccaaagaaggagacaagactgaaactaacgataaggaaaaaagatcacgaagaccaaccccatcctcttcatcaaaacccgacaaaacccgattcagactccgacaagtggttgatgtccccaaagatgcggttgatcaagaaaacaatcaccaacaataaacagctcattgatcagactaataataataatcataaagaaagtgatcactaccctttgaatcataagactaatttcgacgaggatcaccatgaagatcttaatttcaagaacgtcttgaccaggaagaccacggccgcgaccaccgagaatcgctacaatacaatcaacgagaacggttatagtaataacaatggcgtgattagggtttgttcggattgtaacaccaccaagactcctctttggcgaagtggacctcgaggtcccaagtctctttgtaacgcatgtggtatacggcaaagaaaggcaaggcgagccgctatggccgcggccgctgcagccggcgaccaagaggtggcggtagcgccccgagtgcaacaattaccgctgaaaaagaagttgcaaaataaaaaaaagagatcaaacggaggggaaaaatacaatcactctcctccaatggtggccaaggccaaaaagtgcaagatcaaagaggaagaggagaaggaaatggaagcggaaacggttgccggagattcagagatcagcaaatctacaacttcttctaattcttcgatttcgtcaaacaaattttgtttcgatgatttgacaataatgttgagcaaaagctcagcttatcaacaagtgttcccacaagatgagaaggaggctgctgttttgctcatggctctgtcgtatggaatggttcacggttga

SEQ ID NO: 156 - protein, 398 aa, Arabidopsis thaliana
MDSNFHYSIDLNEDQNHHEQPFFYPLGSSSSLHHHHHHHHHQVPSNSSSSSSSISSLSSYLPFLINSQEDQHVAYNNTYHADHLHLSQPLKAKMFVANGGSSACDHMVPKKETRLKLTIRKKDHEDQPHPLHQNPTKPDSDSDKWLMSPKMRLIKKTITNNKQLIDQTNNNNHKESDHYPLNHKTNFDEDHHEDLNFKNVLTRKTTAATTENRYNTINENGYSNNNGVIRVCSDCNTTKTPLWRSGPRGPKSLCNACGIRQRKARRAAMAAAAAAGDQEVAVAPRVQQLPLKKKLQNKKKRSNGGEKYNHSPPMVAKAKKCKIKEEEEKEMEAETVAGDSEISKSTTSSNSSISSNKFCFDDLTIMLSKSSAYQQVFPQDEKEAAVLLMALSYGMVHG

SEQ ID NO: 157 - DNA, 1197 bp, Arabidopsis thaliana
atggattcaaattttcattactcgatagatcttaacgaagatcaaaaccatcacgaacaaccctttttctatcctcttggatcctcttcctcgcttcatcatcatcatcatcatcatcatcatcaagtcccttctaattcttcatcttcttcttcgtccatttcatcgctctcctcttacctccctttcttgatcaactctcaagaagatcaacatgttgcctacaacaacacttatcacgctgatcatctccatctttctcaacccctcaaggccaagatgtttgtggctaacggtggatcatcagcatgcgatcacatggtgccaaagaaggagacaagactgaaactaacgataaggaaaaaagatcacgaagaccaaccccatcctcttcatcaaaacccgacaaaacccgattcagactccgacaagtggttgatgtccccaaagatgcggttgatcaagaaaacaataaccaacaataaacagctcattgatcagactaataataataatcataaagaaagtgatcactaccctttgaatcataagactaatttcgacgaggatcaccatgaagatcttaatttcaagaacgtcttgaccaggaagaccacggccgcgaccaccgagaatcgctacaatacaatcaacgagaacggttatagtaataacaatggcgtgattagggtttgttcggattgtaacaccaccaagactcctctttggcgaagtggacctcgaggtcccaagtctctttgtaacgcatgtggtatacggcaaagaaaggcaaggcgagccgctatggccgcggccgctgcagccggcgaccaagaggtggcggtagcgccccgagtgcaacaattaccgctgaaaaagaatttgcaaaataaaaaaaagagatcaaacggaggggaaaaatacaatcactctcctccaatggtggccaaggccaaaaagtgcaagatcaaagaggaagaggagaaggaaatggaagcggaaacggttgccggagattcagagatcagcaaatctacaacttcttctaattcttcgatttcgtcaaacaaattttgcttcgatgatttgacaataatgttgagcaaaagctcagcttatcaacaagtgttcccacaagatgagaaggaggctgctgttttgctcatggctctgtcgtatggaatggttcacggttga

SEQ ID NO: 158 - protein, 398 aa, Arabidopsis thaliana
MDSNFHYSIDLNEDQNHHEQPFFYPLGSSSSLHHHHHHHHHQVPSNSSSSSSSISSLSSYLPFLINSQEDQHVAYNNTYHADHLHLSQPLKAKMFVANGGSSACDHMVPKKETRLKLTIRKKDHEDQPHPLHQNPTKPDSDSDKWLMSPKMRLIKKTITNNKQLIDQTNNNNHKESDHYPLNHKTNFDEDHHEDLNFKNVLTRKTTAATTENRYNTINENGYSNNNGVIRVCSDCNTTKTPLWRSGPRGPKSLCNACGIRQRKARRAAMAAAAAAGDQEVAVAPRVQQLPLKKNLQNKKKRSNGGEKYNHSPPMVAKAKKCKIKEEEEKEMEAETVAGDSEISKSTTSSNSSISSNKFCFDDLTIMLSKSSAYQQVFPQDEKEAAVLLMALSYGMVHG

SEQ ID NO: 159 - DNA, 1059 bp, Arabidopsis thaliana
atgggttccaattttcattacacaatagatctcaatgaagatcaaaaccatcagccttttttcgcttctcttggatcctctcttcatcatcatctacaacaacaacaacaacaacaacaacattttcatcaccaagcttcttctaatccctcttctttgatgtcaccgtctctttcctactttcctttcttgataaactctcgccaagatcaagtatatgttgggtacaacaataacacttttcatgatgttcttgatacccatatctcccaacctctcgagaccaagaactttgtatctgatggtggttcatcatcaagtgatcaaatggtgcccaagaaggagacacgactaaaattgacgataaagaagaaagataatcatcaagaccaaaccgatcttcctcaatccccaataaaagacatgacaggaactaactcgctcaagtggatatcttcgaaggtgagattaatgaagaagaaaaaggcgattattaccaccagcgacagcagcaaacaacacactaataacgaccaatcctcaaacctaagcaattcggaaagacagaatggttataacaacgattgcgtgattaggatttgctccgattgtaacacaaccaagactcctctttggagaagtggtccgagaggtcccaagtctctttgtaacgcttgtggaataaggcaaaggaaggccaggcgggccgctatggccacggcaaccgcaaccgcagtctctggcgtatccccaccggtcatgaagaagaagatgcaaaacaagaacaagatatcaaatggagtttataaaatcttatctcctttgcccctaaaggtaaacacgtgtaagagaatgatcacactagaggagaccgcattagccgaggatttggagacccagagcaactccacgatgttatcatcttcagacaatatctatttcgatgatctagcattactgttgagcaaaagttcagcttatcagcaagttttccctcaagatgagaaggaggctgccattttactaatggctctatcgcacggaatggttcacgggtga

SEQ ID NO: 160 - protein, 352 aa, Arabidopsis thaliana
MGSNFHYTIDLNEDQNHQPFFASLGSSLHHHLQQQQQQQQHFHHQASSNPSSLMSPSLSYFPFLINSRQDQVYVGYNNNTFHDVLDTHISQPLETKNFVSDGGSSSSDQMVPKKETRLKLTIKKKDNHQDQTDLPQSPIKDMTGTNSLKWISSKVRLMKKKKAIITTSDSSKQHTNNDQSSNLSNSERQNGYNNDCVIRICSDCNTTKTPLWRSGPRGPKSLCNACGIRQRKARRAAMATATATAVSGVSPPVMKKKMQNKNKISNGVYKILSPLPLKVNTCKRMITLEETALAEDLETQSNSTMLSSSDNIYFDDLALLLSKSSAYQQVFPQDEKEAAILLMALSHGMVHG

SEQ ID NO: 161 - DNA, 636 bp, Vitis vinifera
atggcggatgacaataagagcagccacaaattrtcggtttttaagaaggaagaaggagatgaaggtaataaaagtactgagaaatggatgtcttcaaagatgaggctgatgagaaaaatgatgaactcggattgcactacagcgaaaatcgagcagaaggttgaagatcatcagcagtgggacaatattaaygagwtcaactcttccaacaatactagtaatatcccaattagagtctgcagtgattgtaacacaaccaaaacccctctttggaggagyggtcctagaggtcccaagtcactttgcaatgcctgtggaattaggcaaaggaaggcgagacgagccatggcagcagcggcagcagcagcagcgaatggcacagccgttgggaccgagatatcgcctatgaagatgaagctgcccaacaaggaaaagaagatgcatacaagcaatgtagggcaacagaagaagctctgcaagcccccttgtcctcctcccaccgagaagaagctttgcttcgaagatttcacttcgagtatttgcaagaactcaggttttagacgagtgttccctcgggatgaagaagaagccgcgatcctcctaatggccttatcttgtgaccttgtttacagttga

SEQ ID NO: 162 - protein, 211 aa, Vitis vinifera
  misc_feature (66)..(66): Xaa can be any naturally occurring amino acid
MADDNKSSHKLSVFKKEEGDEGNKSTEKWMSSKMRLMRKMMNSDCTTAKIEQKVEDHQQWDNINEXNSSNNTSNIPIRVCSDCNTTKTPLWRSGPRGPKSLCNACGIRQRKARRAMAAAAAAAANGTAVGTEISPMKMKLPNKEKKMHTSNVGQQKKLCKPPCPPPTEKKLCFEDFTSSICKNSGFRRVFPRDEEEAAILLMALSCDLVYS

SEQ ID NO: 163 - DNA, 546 bp, Vitis vinifera
atgatctcggatcaaactggtgcccaaaaaccaagcaacactgcactcaattttggagatcacaagcagcaatccttgccttctgaaaccgattacaatagcatcaattcctctaatatcaacagcaacaacacaattagggtttgtgcagattgtaacacaactaagacccctctgtggaggagtggcccaagaggccctaagtctctctgcaacgcctgcggaatcaggcaaaggaaggctagacgggccatggctgctgctgctgcaactgctaatggcacaattcttccaaccaacacagcacccacaaagaccaaggccaagcacaaagacaagaagtcgagcaatggtcatgtttcacactacaagaaacggtgcaaactggctgcggccccatcttgtgaaacaaagaagctttgtttcgaggacttcaccataagcttgagtaagaattccgctttccaccgagttttcctccaagacgagatcaaggaagcggcgatcctgctaatggctctatcttgcggcctcgtccatggttga

SEQ ID NO: 164 - protein, 181 aa, Vitis vinifera
MISDQTGAQKPSNTALNFGDHKQQSLPSETDYNSINSSNINSNNTIRVCADCNTTKTPLWRSGPRGPKSLCNACGIRQRKARRAMAAAAATANGTILPTNTAPTKTKAKHKDKKSSNGHVSHYKKRCKLAAAPSCETKKLCFEDFTISLSKNSAFHRVFLQDEIKEAAILLMALSCGLVHG

SEQ ID NO: 165 - DNA, 420 bp, Arabidopsis thaliana
atgctagatcacagtgaaaaggtcttattggttgattcagaaaccatgaaaacaagagctgaagatatgatcgaacagaacaacactagtgttaacgacaagaagaagacttgtgctgattgtggaaccagtaaaactcctctttggcgtggtggtcctgttggtccaaagtcgttgtgtaacgcgtgtgggatcagaaacagaaagaagagaagaggaggaacagaagataataagaaattaaagaaatcgagttctggcggcggaaaccgtaaatttggtgaatcgttaaaacagagtttgatggatttggggataaggaagagatcaacggtggagaagcaacgacagaagcttggtgaagaagaacaagccgctgtgttactcatggctctttcttatggctctgtttacgcttag

SEQ ID NO: 166 - protein, 139 aa, Arabidopsis thaliana
MLDHSEKVLLVDSETMKTRAEDMIEQNNTSVNDKKKTCADCGTSKTPLWRGGPVGPKSLCNACGIRNRKKRRGGTEDNKKLKKSSSGGGNRKFGESLKQSLMDLGIRKRSTVEKQRQKLGEEEQAAVLLMALSYGSVYA

SEQ ID NO: 167 - DNA, 363 bp, Vitis vinifera
atgaacaacaaaaacccagatgctgtttcgtcggctgagagccaggttaacgagccgaagaagacctgcgctgattgtggcaccaccaaaacccctctctggagaggcggtccagctgggcctaagtctctgtgcaatgcatgtggtatcagaagcaggaagaagagaagagccttcctgggaagcagcaaccactcccataacaatggtggcggcaacgggaacaataaattgggggactcgctgaagaggaggctcttcgcattgggaagagaggtgttgttgcagagatcaacactgggagaagaagagcaagcggccgtactgttaatggctctgtcttacggctacgtctatgcttaa

SEQ ID NO: 168 - protein, 120 aa, Vitis vinifera
MNNKNPDAVSSAESQVNEPKKTCADCGTTKTPLWRGGPAGPKSLCNACGIRSRKKRRAFLGSSNHSHNNGGGNGNNKLGDSLKRRLFALGREVLLQRSTLGEEEQAAVLLMALSYGYVYA

SEQ ID NO: 169 - DNA, 378 bp, Vitis vinifera
atgatggatctgagcaaaaaggaatcattgtctgaggaaatgaatgagatcaagaaatgttgtactgattgcaagaccaccaagacgcccctgtggagaggtgggccagctgggcctaagtcactctgcaatgcatgtgggatcagatacaggaagaggaggagttccatggtgggtgtgaacaaaaagaaagagagaatgaacagtggtagccatgatttgagtgaaactttgaagcagtcactcatggctttggggaatgaggtgatgatgcagaggcagagatcttcagtgaagaaacagaggaggaagttgggggaagaagaacaagcagctgtactgttgatggcactctcatgtggctctgtttttgcctag

SEQ ID NO: 170 - protein, 125 aa, Vitis vinifera
MMDLSKKESLSEEMNEIKKCCTDCKTTKTPLWRGGPAGPKSLCNACGIRYRKRRSSMVGVNKKKERMNSGSHDLSETLKQSLMALGNEVMMQRQRSSVKKQRRKLGEEEQAAVLLMALSCGSVFA

SEQ ID NO: 171 - DNA, 411 bp, Oryza sativa
atggattcctcgtcggtcgagaaggggagtgggtcgatagatccggacgagcgcacggcctccggcgagcccaaggcgtgcaccgactgccacaccaccaagactccgctctggcgcggcggcccctccggccccaagtcgctatgcaacgcgtgcgggatccggtaccggaagaagagacgggaggcgctggggctcgacgccggcgagggcggcgcggagcggcaggagaagaagaagagcaagagggagagaggggaggaggtgaccatggagctccgcatggtggggttcgggaaggaggtggtcctgaagcagcggcggcggatgcggcggaggagacgcctcggcgaggaggagaaggcggccatcctcctcatggccctctcctccggagtcatctacgcctga

SEQ ID NO: 172 - protein, 136 aa, Oryza sativa
MDSSSVEKGSGSIDPDERTASGEPKACTDCHTTKTPLWRGGPSGPKSLCNACGIRYRKKRREALGLDAGEGGAERQEKKKSKRERGEEVTMELRMVGFGKEVVLKQRRRMRRRRRLGEEEKAAILLMALSSGVIYA

SEQ ID NO: 173 - DNA, 429 bp, Oryza sativa
atggatatggattcttcctcctccccggtggacaaggtggatcccgacgagtgcaacggctctaaggcttgcgctgactgccacactaccaagactccgctatggcgaggcggacccggaggacccaagtcgctgtgcaacgcatgcgggatccggtatcggaagaggcggcgggcggcgctcggcctggactcttccgccaccgccaccgccaccgacggagcggagcagcagaagaagactaaggccaagaaggaaaaggcacaggaggaggaggtcaccatggagctccacacggtgggcttccgcagcaaggacgctgctgtgttcaagcagcgccggcggatgcgccgcaggaaatgccttggcgaggaggagagggccgccatcctgctcatggcactctcctcgggcgtcatctacgcctga

SEQ ID NO: 174 - protein, 142 aa, Oryza sativa
MDMDSSSSPVDKVDPDECNGSKACADCHTTKTPLWRGGPGGPKSLCNACGIRYRKRRRAALGLDSSATATATDGAEQQKKTKAKKEKAQEEEVTMELHTVGFRSKDAAVFKQRRRMRRRKCLGEEERAAILLMALSSGVIYA

SEQ ID NO: 175 - DNA, 885 bp, Arabidopsis thaliana
atgcagactccgtacactacttcaacgcaggggcaatattgtcattcttgtggaatgttccaccaccatagccaaagctgctgctacaacaacaacaacaactccaacgccggttcttactcgatggtcttctccatgcaaaacggtggcgttttcgagcagaacggtgaggactatcatcactcttcctccctcgttgactgcactctctctcttggaactccttctacgaggctttgtgaggaagatgagaaacgtagacgctctacttcatctggtgcttcttcttgcatctccaacttttgggacttgattcacaccaaaaacaacaactccaaaacggcaccgtacaataacgttccttctttctccgctaacaagccaagtcgcggttgttccggtggtggtgatggcggaggaggcggtggcggaggtgactctcttctcgctagacgctgtgccaactgtgacactacttctactccactatggaggaatggtcctagaggccctaagtccctatgcaacgcatgcggcattcgtttcaagaaggaagagagaagaactactgcggcttcaggaaacaccgtcgtcggagctgcaccggttcaaaccgaccagtacgggcatcacaactctggctacaataattaccatgctgccactaataacaacaataataatggtactccgtgggctcatcaccactcgacgcagagggttccgtgtaattatccggcaaatgagatcaggttcatggatgattacggcagtggagtagcaaacaacgttgaatccgacggtgctcacggcggtgttccgttcctttcttggaggcttaatgtagcggatagggcaagtcttgtccatgactttaccagatga

SEQ ID NO: 176 - protein, 295 aa, Arabidopsis thaliana
MMQTPYTTSTQGQYCHSCGMFHHHSQSCCYNNNNNSNAGSYSMVFSMQNGGVFEQNGEDYHHSSSLVDCTLSLGTPSTRLCEEDEKRRRSTSSGASSCISNFWDLIHTKNNNSKTAPYNNVPSFSANKPSRGCSGGGGGGGGGGGGDSLLARRCANCDTTSTPLWRNGPRGPKSLCNACGIRFKKEERRTTAATGNTVVGAAPVQTDQYGHHNSGYNNYHAATNNNNNNGTPWAHHHSTQRVPCNYPANEIRFMDDYGSGVANNVESDGAHGGVPFLSWRLNVADRASLVHDFTR

SEQ ID NO: 177 - DNA, 840 bp, Oryza sativa
atgcttcaccattactacagcggcggcgccggccatcatcaggacgtcgctgcagctggtagccccggcgacatggcttcctccaccttctcgctcttcttcccgatgtccaatgggcagtgttggccgccgtcgacggtggaggagtccgcggcctacgacgaccacagcaccgtcaccacctctccttcctcgccttcgtcgtcctccaccggctccgtcgactgcacgctctcgctcggcacgccgtcgtctcgccgcgccgagcccgtcgcggcggcggcgccagcggcaaaccatggggcgcccgtgccggcgcattatccgtcgctgtcagcggcgaccgtgtcctgggacgcgactgccgagtcgtactattgtggccagcaggggaggccggccaccggcgccgccaagtgcgccgccggcgccgggcacgacgcgctcctcgaccgccgctgcgccaactgcggcaccgcgtccacgccgctctggaggaacggccctcgcggacccaagtcgctgtgcaacgcgtgcgggatcaggtacaagaaggaggagcggcgcgcggcggcgacgacgacgacggccgacggcgccgccggatgcggcttcatcaccgcgcagcgtggacgcgggtcgaccgcggccaaggcggcgcccgccgtgacgacgtgcggcgaggagacgtcaccgtacgtcgtcggcggcggcggcggcggcggcgaggtcgcggacgcggcgtatctcgcctggcggctcaacgtcgtcccaccggcggcgacggcgacggcgttctcggtgtggccggagcgagctagcctctaccactacaactag

SEQ ID NO: 178 - protein, 279 aa, Oryza sativa
MLHHYYSGGAGHHQDVAAAGSPGDMASSTFSLFFPMSNGQCWPPSTVEESAAYDDHSTVTTSPSSPSSSSTGSVDCTLSLGTPSSRRAEPVAAAAPAANHGAPVPAHYPSLSAATVSWDATAESYYCGQQGRPATGAAKCAAGAGHDALLDRRCANCGTASTPLWRNGPRGPKSLCNACGIRYKKEERRAAATTTTADGAAGCGFITAQRGRGSTAAKAAPAVTTCGEETSPYVVGGGGGGGEVADAAYLAWRLNVVPPAATATAFSVWPERASLYHYN

SEQ ID NO: 179 - DNA, 56 bp, Artificial sequence
  primer: prm10106
ggggacaagtttgtacaaaaaagcaggcttaaacaatgcttcaccattactacagc

SEQ ID NO: 180 - DNA, 48 bp, Artificial sequence
  primer: prm10107
ggggaccactttgtacaagaaagctgggtccaacgctaatgctacact

SEQ ID NO: 181 - DNA, 1647 bp, Arabidopsis thaliana
atgggtcgttcgaaactagcttctcgtcctgctgaggaagacctgaatccaggaaaatcaaaaaggaaaaagatatcattgggtcctgagaatgctgcggcatcaatttccaccggaattgaagctgggaatgagaggaaacctggcctttactgttgtaactattgcgataaagatctgtctggtttggttcgtttcaaatgtgctgtttgtatggactttgatctttgtgtggaatgcttttctgtcggcgttgaacttaatcgtcacaagaacagtcacccatatcgtgttatggacaatttgtctttttcgcttgttacttctgattggaatgccgatgaagagatactccttcttgaggccattgcgacatacgggtttggcaattggaaagaagttgcagaccatgttggtagtaagacaacgacagaatgtattaaacacttcaattctgcttacatgcagtcaccatgctttccacttccggacttgtcccatactattggaaagagcaaagatgagctgcttgctatgagtaaagatagtgcagtcaaaacagaaatacctgcatttgtgaggctatctccaaaagaagagttacctgtgtcagctgaaatcaaacacgaagcttcagggaaggtcaatgaaatagatccacctttgtctgccttagctggagtcaagaagaaaggcaatgtaccgcaggctaaggacatcatcaagttggaagctgcaaaacaacaatctgacaggagtgtcggggagaagaaactcagacttcctggagagaaagttccattagtaacagagttatatggttacaatctaaagagggaagaatttgagatcgaacatgacaacgatgctgagcaactgcttgctgacatggaatttaaggattctgacacagatgctgagcgtgagcagaaactgcaggttcttcgtatttactcgaaaaggcttgatgagaggaagcggaggaaggaatttgttctggaaagaaacttgttgtaccctgatcaatatgagatgagcctttcagcagaggagagaaaaatatataaaagctgtaaagtgtttgcgcggttccaatccaaagaagagcacaaggaactgattaagaaagtcattgaagagcaccaaattctcagaagaatcgaggatcttcaggaagctagaactgctggttgcaggacaacttcagacgcaaatagatttatagaagagaagagaaagaaggaagctgaagaaagtatgctgctgcggcttaaccacggtgcaccaggcagtatagccggtaaaacactaaaaagtccaagagggttacccagaaatttgcatccctttggttctgactcactgccaaaggtcacacctccaagaatatacagcggtttggacacttgggatgttgatggtctccttggagctgacttactctcagagaccgaaaagaagatgtgcaatgagaccagaatactgcctgtacactatttgaagatgttggatatcttaacaagagaaataaagaaggggcagataaagaaaaagtctgatgcttatagcttcttcaaagtagagccgagtaaagtagacagagtatatgatatgctggttcataagggaataggtgactcaacatga

SEQ ID NO: 182 - protein, 548 aa, Arabidopsis thaliana
MGRSKLASRPAEEDLNPGKSKRKKISLGPENAAASISTGIEAGNERKPGLYCCNYCDKDLSGLVRFKCAVCMDFDLCVECFSVGVELNRHKNSHPYRVMDNLSFSLVTSDWNADEEILLLEAIATYGFGNWKEVADHVGSKTTTECIKHFNSAYMQSPCFPLPDLSHTIGKSKDELLAMSKDSAVKTEIPAFVRLSPKEELPVSAEIKHEASGKVNEIDPPLSALAGVKKKGNVPQAKDIIKLEAAKQQSDRSVGEKKLRLPGEKVPLVTELYGYNLKREEFEIEHDNDAEQLLADMEFKDSDTDAEREQKLQVLRIYSKRLDERKRRKEFVLERNLLYPDQYEMSLSAEERKIYKSCKVFARFQSKEEHKELIKKVIEEHQILRRIEDLQEARTAGCRTTSDANRFIEEKRKKEAEESMLLRLNHGAPGSIAGKTLKSPRGLPRNLHPFGSDSLPKVTPPRIYSGLDTWDVDGLLGADLLSETEKKMCNETRILPVHYLKMLDILTREIKKGQIKKKSDAYSFFKVEPSKVDRVYDMLVHKGIGDST

SEQ ID NO: 183 - DNA, 1464 bp, Arabidopsis thaliana
atgggtcgctctcgagggaacttccaaaatttcgaagaccctactcagagaacgaggaaaaagaaaaatgcggctaatgtggagaactttgagtctacttctttggtaccaggtgctgagggaggagggaagtataactgcgattattgccagaaagacattactggaaaaattaggataaagtgtgctgtctgtccagattttgatctctgtatagaatgtatgtctgttggagcagagatcactcctcacaaatgtgatcacccataccgagttatgggaaatctaactttcccgcttatttgtcctgactggagtgcggatgatgaaatgcttctcctggagggacttgaaatttatggcttgggaaactgggcagaggttgcggagcacgtgggaacgaagagtaaagaacagtgtcttgagcactacagaaacatctatttgaactcaccatttttcccacttccggatatgtcacatgtagcagggaagaacagaaaagaacttcaagccatggctaaaggacgcattgatgacaagaaagcagagcagaacatgaaagaagagtacccgttctctcctcctaaagtcaaagttgaagacacacaaaaagagtcttttgtagacagaagttttggagggaagaaacctgtttccacctcggtaaacaactctttggttgagctgagtaattacaaccagaaaagagaagagtttgaccctgaatatgacaatgatgctgagcaactcttggcggagatggagttcaaagagaacgatactcctgaagaacatgaactgaagctgcgtgtgttgcgtatctattcaaaaaggcttgatgagaggaaacgtagaaaagaattcataatagaaagaaacctgttgtacccaaatccctttgagaaggacctgtctcaggaggagaaagtacaatgccgacgtttggacgtttttatgcgttttcattcaaaagaggagcacgacgagctactccgtaatgttgtaagcgagtaccgcatggtgaaacggctcaaagatctcaaggaagctcaagtggcagggtgtcgttcaacggctgaagcagagaggtatctgggaaggaagaggaagagagaaaacgaagaagggatgaacagagggaaagagagcggtcaatttggtcaaattgcaggggagatgggctctagaccacctgtgcaagcttcttcaagctatgtgaatgatttggacttgattgggttcacggagtcgcaactgctgtctgaatccgagaagcgtctctgcagcgaggtcaagttggttccaccggtttatctacagatgcaacaagtgatgtcacatgagatattcaaagggaatgtaacgaagaagtcggatgcatatagccttttcaagattgatccaaccaaagtggatcgagtttatgatatgcttgtgaagaagggtattgctcaactttaa

SEQ ID NO: 184 - protein, 487 aa, Arabidopsis thaliana
MGRSRGNFQNFEDPTQRTRKKKNAANVENFESTSLVPGAEGGGKYNCDYCQKDITGKIRIKCAVCPDFDLCIECMSVGAEITPHKCDHPYRVMGNLTFPLICPDWSADDEMLLLEGLEIYGLGNWAEVAEHVGTKSKEQCLEHYRNIYLNSPFFPLPDMSHVAGKNRKELQAMAKGRIDDKKAEQNMKEEYPFSPPKVKVEDTQKESFVDRSFGGKKPVSTSVNNSLVELSNYNQKREEFDPEYDNDAEQLLAEMEFKENDTPEEHELKLRVLRIYSKRLDERKRRKEFIIERNLLYPNPFEKDLSQEEKVQCRRLDVFMRFHSKEEHDELLRNVVSEYRMVKRLKDLKEAQVAGCRSTAEAERYLGRKRKRENEEGMNRGKESGQFGQIAGEMGSRPPVQASSSYVNDLDLIGFTESQLLSESEKRLCSEVKLVPPVYLQMQQVMSHEIFKGNVTKKSDAYSLFKIDPTKVDRVYDMLVKKGIAQL

SEQ ID NO: 185 - DNA, 2745 bp, Dictyostelium discoideum
atgacttcaacaataaataaagaagaacctacaacacttgtaaataaaaaaaggagaaaagaacatgttgatgatgacgatgataatgatgatgacattgaaatgcaaaatgtatcaaatgataatattaataatacagatgatgaaaataataatgtaaatacaaatggaaataatacaaacaaaaccaacaacaacaacaacaacaacaacaacaacaacaacaataataatgaagaagatgacgatgaagaagacttattaattaccaaaagaaggaatagtagatcaacaacaatgagtaataatagtagtaataaatcaacaccatctaaaaagaaaagaattaagaaatcatatgataatgataaagattttgtaggagatgatgaagaggaagatgataatgatgatgaagatgatgatggtgatgttgtaatctcaaataataataataataataataataataatactaataataataataataataataatggtaatggtaatggtaataacaatacaaacaattcattcgaagaagatgatgatgaagaggatgatgatgaagaagatgaagaagaagaagaagaaggtatgaaaatatcaaaaagtaaaagacaaacacaaataataccaccaacacaaagtgaagttgatgatcttgtaaataaaagttttaatagtgtagatgatgatgaagaagataatgaagaggatgataaaacaaaaaatactactactactactgctacaaatactactaatgtaccaacaacaacaacaacaactacaacaacatcgaacaatactacattaccaactactaccactactaccaccactaataatacaacaaaaccaaatgttaaaatagaacaaccaaaaacacaacaaccaccacaaccacaaccaataaataaaccaactcaatcaaatactatcacaacaaatacaaatacaagtacaaatacaaacacagctacaaatacaaattcaaatacagctacagccacaacaacatcacctacctcaatgacaaaacaaacaaggaagtcaaccaattcaccaactaacagtaatggtaataataataataataataataataataattttatagaggaacaagtgaatgaaggattatatcattgtgattattgtcaaaaggatattagtggtgttgtacgtataagatgttcagtatgtactgatttcgatttatgtttagaatgttttagtgttggtgtagagattacaccacatcgtaattttcatgattatcatgtagttgataatatgcatttcccaatgtttactgatgattggggtgctgatgaagaattattacttttagaagcaattgaattatatggtttaggtaattggaatgaagtttcagagaatgtaggcgcacattcaaaatcacctttagaatgtaaagcacattatttcgctcattatttaaatagttcaacttcacctttaccagatacatcaaaggttttaactacaaatgaaaatgttcactttaaaagagcaaaaacaactgtaaatggtaattattataatgattatattattgataatagtgacgatgatgataataataataataataataattataacgataatagtaataatacaacaccaacaaagtcattcaatagtgttaataaaagtaaaaaattaaatcatagaaatagtcatggtgaagaaggaccaagtggaccagtaacagattcagttggatatatgaagaatagaggacattttgaagtagaatatgataatgaagcagagttggttgtaaaggatttaacatttgaacctgacgatagtcaagcagatagagatattaaattgaatgtattagaatcctatgatcaaagattggatgaacgtattagaagaaggaatttcattgttgagaaaggtttattagattatagaaaagtagagagaaaacgatacaaagatgataaagagatattaaattcattgaaatgtttccttcaaacagttaccaaagaagagcatgaatcaatgataaatggattaataaatgaaaagaatataaagaatagaattctacaattacaagagtatcgtgaaaatggtattaaaacattggcagatggtcaaaattttgatgaagataaaagaaaacgtgaagttgataaatctatgaaacgttccaaatctgaattggcatcatatagtttaaatagtggattaagttcatacaatccaaatcataatccatttggtcatcattatttaggtggtagtagtagtggattaagtggtggtagtggtggaggtggtggtggtggtggtgatccatcatttaaaactcaaaaacaattaactaaagaaaaagaagatatttatttaggtattggtgagaataggaaacatcattcaagtaaattgaaaaagaatgctaaaatggaattggaaggtttaccaaatgctgatgcactctcattaaaagagaaacaaatttgtacaactcataaacttttaccacaacaatacctaattgtcaaacaagcattaatctctgaatctttaaaaactcaaggtgtaattaaattatcaaccgcttttaaactaattaaattaaatcaagttaaaattcatagacttttagaattctttgaaagaaatcattggttaaaatttaatattgattgtgaaactaacacttctaatactacttcaaattataaataa

SEQ ID NO: 186 - protein, 914 aa, Dictyostelium discoideum
MTSTINKEEPTTLVNKKRRKEHVDDDDDNDDDIEMQNVSNDNINNTDDENNNVNTNGNNTNKTNNNNNNNNNNNNNNNEEDDDEEDLLITKRRNSRSTTMSNNSSNKSTPSKKKRIKKSYDNDKDFVGDDEEEDDNDDEDDDGDVVISNNNNNNNNNNTNNNNNNNNGNGNGNNNTNNSFEEDDDEEDDDEEDEEEEEEGMKISKSKRQTQIIPPTQSEVDDLVNKSFNSVDDDEEDNEEDDKTKNTTTTTATNTTNVPTTTTTTTTTSNNTTLPTTTTTTTTNNTTKPNVKIEQPKTQQPPQPQPINKPTQSNTITTNTNTSTNTNTATNTNSNTATATTTSPTSMTKQTRKSTNSPTNSNGNNNNNNNNNNFIEEQVNEGLYHCDYCQKDISGVVRIRCSVCTDFDLCLECFSVGVEITPHRNFHDYHVVDNMHFPMFTDDWGADEELLLLEAIELYGLGNWNEVSENVGAHSKSPLECKAHYFAHYLNSSTSPLPDTSKVLTTNENVHFKRAKTTVNGNYYNDYIIDNSDDDDNNNNNNNYNDNSNNTTPTKSFNSVNKSKKLNHRNSHGEEGPSGPVTDSVGYMKNRGHFEVEYDNEAELVVKDLTFEPDDSQADRDIKLNVLESYDQRLDERIRRRNFIVEKGLLDYRKVERKRYKDDKEILNSLKCFLQTVTKEEHESMINGLINEKNIKNRILQLQEYRENGIKTLADGQNFDEDKRKREVDKSMKRSKSELASYSLNSGLSSYNPNHNPFGHHYLGGSSSGLSGGSGGGGGGGGDPSFKTQKQLTKEKEDIYLGIGENRKHHSSKLKKNAKMELEGLPNADALSLKEKQICTTHKLLPQQYLIVKQALISESLKTQGVIKLSTAFKLIKLNQVKIHRLLEFFERNHWLKFNIDCETNTSNTTSNYK

SEQ ID NO: 187 - DNA, 1683 bp, Lycopersicum esculentum
atgggtcgttctcgggctgttcatcaatccactgatgatgatccaagccagaggtctaagagaaaaagggcagtgccaaatgtggagagttttgatactgcagctactggccaaatattgactgaagggaaaaaggctttgtaccattgcaattattgcaataaagacatatctggaaggattcggattaaatgtgttgtgtgttctgactttgatctttgtgtggaatgcttttctgttggagcagaagtgcagcctcacaaaagcaatcatctgtatagggttatggataacctgtcatttcctctcatatgtgctgactggaatgctgatgaggaaatgttacttctagagggtttggaaatgtacggattggcaaactgggctgaagttgccgaacatgttggaacgaagagtaaacagcagtgtattgaccactataagtccacctatattagttctccttgttttccgcttccggacatgtcccatgttatgggaaagaacagagaggaacttcttgccatggccaaggatcaaggatatgcagctcccgggggagttaatgttaaagaagagtctccattctctgcaggaatcaagatggaagatcaaagggaagaaaattcaactggacttgcctcagttggaggttctgcttctggtacattagcaggagctggaaagaggacatctagcttacttcatagtaaggagaatcatgatagcatcaaagtggaaggttgtcctgcagacaggagtgtcggagagaaaaagcctaggtcatcagtggacgaggggccttccatgacagaattaagtggttataattccaagagagaggagtttgaaattgaatacgataatgatgctgagcagatggtggctgatatggaatttaaagagacagataccaatgctgagcgtgaactgaaacttcgggtattgcgtatatacaataaaaggcttgatgagaggaaacgtaggaaggattttattttggaaaggaaactacttcatcctgatccttttgagaaagacctcaccccggaggagaaggacatatgccgtcgttacagggtgttcatgcgttttagttctaaagaggagcatgaggatttccttaggagcataatcgaggagcaccgaatagttaaacgaatacgagatcttcaggatgcccgaattgctggttgccgaactttagctgaggcagaaagatatgttgaacaaaagagagcgcgggaatctgaagaaaatatacgtagactgaaggagaacacccagagtggcccaagtggaaaatatttgcaaagagcaggtcactttaaagtggagcatgacagcagccccagaggagttggtaggggccctgaaatgatggattgttgcaatgacttatcatcaaccaccgcaccacatggtgttggaagtgctgtagacatttgggatgtcagtgggttttcaggagctgagttgctctcagaagctgaaaaaaagctttgtgatgagatgagaatcctgccggctcattatctaaacatgtcgcaaaccatgtccatggggatctttaatggcaacatcaccaagaaatctgatgcgcatggtctattcaatgttgatccgaataagattgacaaagtgtatgagatgcttgtcaaaaagggcctggctcaagcataa

SEQ ID NO: 188 - protein, 560 aa, Lycopersicum esculentum
MGRSRAVHQSTDDDPSQRSKRKRAVPNVESFDTAATGQILTEGKKALYHCNYCNKDISGRIRIKCVVCSDFDLCVECFSVGAEVQPHKSNHLYRVMDNLSFPLICADWNADEEMLLLEGLEMYGLANWAEVAEHVGTKSKQQCIDHYKSTYISSPCFPLPDMSHVMGKNREELLAMAKDQGYAAPGGVNVKEESPFSAGIKMEDQREENSTGLASVGGSASGTLAGAGKRTSSLLHSKENHDSIKVEGCPADRSVGEKKPRSSVDEGPSMTELSGYNSKREEFEIEYDNDAEQMVADMEFKETDTNAERELKLRVLRIYNKRLDERKRRKDFILERKLLHPDPFEKDLTPEEKDICRRYRVFMRFSSKEEHEDFLRSIIEEHRIVKRIRDLQDARIAGCRTLAEAERYVEQKRARESEENIRRLKENTQSGPSGKYLQRAGHFKVEHDSSPRGVGRGPEMMDCCNDLSSTTAPHGVGSAVDIWDVSGFSGAELLSEAEKKLCDEMRILPAHYLNMSQTMSMGIFNGNITKKSDAHGLFNVDPNKIDKVYEMLVKKGLAQA

SEQ ID NO: 189 - DNA, 1632 bp, Lycopersicum esculentum
atgggtcgctctcgtgggaattttcaagctgatgaagatcccagccaaagatcaaggaggaaaaagaatgcctcaagtgtagacaatttagaatctgcgaccactggtcaagggacagctgatggcaaaagggccttgtatcactgcaattattgcaacaaagacattagcgggagaactcgtataaaatgtgctgtatgttacgattttgacctatgtatagagtgcttctctgttggtgctgaggtgcatccccacaaaagccatcaccactatagggttatggatatcttagctttcccgcttatttgcccagactggaatgctgatgaagagatgttgctccttgagggaattgagatgtatggcatgggtaattgggctgaagtaggtgagcatgtcggaacaaagacaaaagaagcctgcattgaccattttaaggatgcgtacttaaagtcaccttactttcctctaccagatatgactcacgtcatggggaaaaacagaatggaactccttgccatggctaaagggaatttcactgataagaaaggactctcttcacttggtgatgttgctcctaaagatgaatcgttctctccgtctcgaatcaaagttgaagacactcataaaattggtccttcaggacgtttaacttctgtatccaatgcgggaatcacaggcataaaaaagccatccagcaaaacgctaatcaaagatcaaaatgaacctgttaaatttgaagataattcaggcagaaattttggaggcaagaaaccgaaatctttgaaggatgatggatcctcattgatgaaattaagtggatatattcccaagaggcaagaatttgatcctgaatatgataatgatgcggagcaactattggctgatatggaattcaaggaaactgaaactgaagaggagcgcgaacttaagctgcgtgttctgcgtatctattccaagaggcttgatgaaagaaaacgccgcaaggtttttattctagagaggaatttactccagccaagtgaatttgagaagaatttgtcaccagaagagaaaggtatatgccgatgttatgatgccattatgcgctttctctcgaaggaggagcatgaagaattacttaaggctgtggtctcagaacatagatatctgaaaagaatacaagaactcaaggaagcgaaagctgcaggttgtcgttcgtctgctgaagttgataggtacttagaaaggaaaaggaagaaggaagttgaagaaggtgttccgagaaagggaagctctcagattggcccaatgagccaggaaagcctgaacatacctgcttcttctgagtcacttggaatacattcaaatagaaaaccttgtagccaggcgattttgagttccgacaccaatgcaggtgttccagctttttctgcaggagaactgttatctgaacctgagaaacaactatgtcaagaaatcaggttatcgccgcatcattatcttaggatgcaggaggtccttacaatacaaatttatagtggtaatatcactagaaaatcagatgcttatcctttgtttcaaatagaagcaactaaagtagatagagtttatgatatgcttttgaagaaaggagttgcacccttgtaa

SEQ ID NO: 190 - protein, 543 aa, Lycopersicum esculentum
MGRSRGNFQADEDPSQRSRRKKNASSVDNLESATTGQGTADGKRALYHCNYCNKDISGRTRIKCAVCYDFDLCIECFSVGAEVHPHKSHHHYRVMDILAFPLICPDWNADEEMLLLEGIEMYGMGNWAEVGEHVGTKTKEACIDHFKDAYLKSPYFPLPDMTHVMGKNRMELLAMAKGNFTDKKGLSSLGDVAPKDESFSPSRIKVEDTHKIGPSGRLTSVSNAGITGIKKPSSKTLIKDQNEPVKFEDNSGRNFGGKKPKSLKDDGSSLMKLSGYIPKRQEFDPEYDNDAEQLLADMEFKETETEEERELKLRVLRIYSKRLDERKRRKVFILERNLLQPSEFEKNLSPEEKGICRCYDAIMRFLSKEEHEELLKAVVSEHRYLKRIQELKEAKAAGCRSSAEVDRYLERKRKKEVEEGVPRKGSSQIGPMSQESLNIPASSESLGIHSNRKPCSQAILSSDTNAGVPAFSAGELLSEPEKQLCQEIRLSPHHYLRMQEVLTIQIYSGNITRKSDAYPLFQIEATKVDRVYDMLLKKGVAPL

SEQ ID NO: 191 - DNA, 1548 bp, Ostreococcus lucimarinus
atggcgagcgcgctcgtgccgaaacggcgacgggtggcgacggaaaacgcgatgacgaagctgagtgggaacggggagtcgtgcgcactgtttaactgtaactattgccaaaaggacatctcgaacgtggtgcgcgtacggtgcgcggagtgcgcaaacgtggatctgtgcacggagtgcttcgcggtcggcgtggagccgcacccgcacaaggcgtatcatcagtatcacgtcatcgacaacatgtcgtttccgctgttcacgcgagattggggggctgacgaagagttgttattgctggaggcagtggagatgttcgggttggggaactggaccgaggtgagcgaacacgtcgggacgaagacgcgcgcgcagtgtcacgcgcactattttgaagtctacgtcaagtctccttgcgcgccgttaccggatatgtcgaagattttaggaaaaggcgtcgcgcgtatgacatcagacgagctcaaagcggaggcggagcaaaaggcgaacgaaaataaggatgtggaggaggaggagaagcttctcgaatcgcttgctaacccgaacgcagtgaagacggagggcaacgtgcaggaactcacaggttacaacatcaagcgcaatgagttcgatcccgaatacgacatggatgccgaacttcccctggcggagatggaatttcgcgaaaacgacaccgaagaagacgtccagatgaagctgcgaatgattgaaatctacaacagccggcttcaagaacgagcgagaagaaaacaattcattctcgaacgcaatctgctgaacgtgaaaaagcaacaaaacgtggaaaagaagcgttcacaatacgagcgcgacttacacggcaccatgcgtatatttgcacgctttctcacgagtaccgagtacgacgtcttgctcgagggtctcgccgcggagcaccgaatccgaacccgcatcaccgaactgaaagagtacagacgcaatggtattcataccatcgcagagggcgaggattacgatttggagaagcgtcgtcgtgagacggagttcgctcgtctacacgcgatcgagcatccaactagcaagaacatagccagagcgaacaacttaggtcctcgccgtcgaatgtacttgtcacttgatctcgccgatcttccaggcgtagaccttttgaacgacgacgaaaaggagttgtgcaggagctgtcgcttattgcctgtgcagtatctctcgatgaaggtggagttgatgcgagagggtctcaagtccgaaaagccgctcaacagaaatcacgttcggaatatgttcaaagtagacccactcaaggctattcgtgtgtatgagttactcctacagcacggctgggtgttggaagacggcttcgtgaacccaggtgaggatgaagactccgaacctgcgccgaaaaagtcagccagcgcagacgaggaggaagacgaggaggacgatgaagtagattacgaaaccgacgataacgacgaagacgaggacgaggaagacgacgaggaagaggatagcgaggaagacgattag

SEQ ID NO: 192 - protein, 515 aa, Ostreococcus lucimarinus
MASALVPKRRRVATENAMTKLSGNGESCALFNCNYCQKDISNVVRVRCAECANVDLCTECFAVGVEPHPHKAYHQYHVIDNMSFPLFTRDWGADEELLLLEAVEMFGLGNWTEVSEHVGTKTRAQCHAHYFEVYVKSPCAPLPDMSKILGKGVARMTSDELKAEAEQKANENKDVEEEEKLLESLANPNAVKTEGNVQELTGYNIKRNEFDPEYDMDAELPLAEMEFRENDTEEDVQMKLRMIEIYNSRLQERARRKQFILERNLLNVKKQQNVEKKRSQYERDLHGTMRIFARFLTSTEYDVLLEGLAAEHRIRTRITELKEYRRNGIHTIAEGEDYDLEKRRRETEFARLHAIEHPTSKNIARANNLGPRRRMYLSLDLADLPGVDLLNDDEKELCRSCRLLPVQYLSMKVELMREGLKSEKPLNRNHVRNMFKVDPLKAIRVYELLLQHGWVLEDGFVNPGEDEDSEPAPKKSASADEEEDEEDDEVDYETDDNDEDEDEEDDEEEDSEEDD

SEQ ID NO: 193 - DNA, 1704 bp, Oryza sativa
atgggccggtctcgcggggtgcccaattccggcgacgatgaaacgaaccacaggtcgaagcggaggagggtcgcgtcgagcggcgatgcgccggactcgctctcggcggcctgcgggggagccggagagggtggtgggaagaaggcgctgtaccactgcaactactgcaataaggatatttccgggaagatccggatcaagtgctccaagtgccccgacttcgacctctgcgtcgagtgcttctcggtcggcgccgaggtcaccccgcaccgcagcaaccatccttacagggtcatggacaacctgtctttccctcttatttgtccagattggaatgcagacgaggaaatccttcttctagagggaattgaaatgtatggtctgggaaattgggctgaagttgcggagcatgttggcaccaagaccaaggcacaatgcattgatcattatacaactgcatacatgaactcaccttgttatccccttccggatatgtctcatgttaacggtaagaacaggaaggaattgcttgctatggctaaagtacaaggcgagagtaaaaaagtgttaccaggggatttgacccctaaggacgagtctccattttctcccccaagggtcaaggtggaagatgcacttggagaaggtttagctggtcgatcaccttcacacatagctgggggtgcaaataagaaagcatcaaatgttggacaattcaaagatggtgctaatgtagcaaaagttgaagatggtcatgtggatagaagtataggtgtgaaaaaaccccgatattctgcagatgaagggccttctttgactgaactgagtggatacaattcaaagagacatgaatttgacccagagtatgataacgatgctgaacaggcactcgctgagatggagtttaaagaaactgattcggaaactgatcgtgaactgaagctaagggtattgcgtatttacttgtcaaggcttgatgaaagaaaaaggagaaaagagttcatactggaaagaaacttactatttcctaatcctttggagaaggatctcacaaatgaagacaaggaagtttaccatcgctataaggtgttcatgcgtttcctttctaaggaggaacatgaagcacttgttaggagtgttcttgaggaacggaaaattcgaaggaggattcaagagcttcaggaatgtcgttctgctggatgccgtacattggctgaagcaaagattcacatagagcaaaagaggaaaaaggaacatgaggtgaatgcccaaaaagctaaggaaagtggtcagctcttatccaacactaaagtggtgcataagacgaatcgacctatgaaaatcgagtcagatggtaatttggatcagaagaaaggtggtgccagcttggattctactggcagggattctccaaaaaccacagggcatgcaggcactaaacattgggatgactgggatattgttggttttcctggggcagagctattaagcaccagtgaaaaaaatctatgctgtcagaacagattgctacccaaccattacctgaaaatgcaggaggttttgatgcaggaaatattcaagggtagtgtcgccaagaaggaagatgcccatgtattatttaaggttgaccctgccaaagtagataacgtttatgatatggtgacgaaaaagttgggtaccaatgaggaggccccgactgtttag

SEQ ID NO: 194 - protein, 567 aa, Oryza sativa
MGRSRGVPNSGDDETNHRSKRRRVASSGDAPDSLSAACGGAGEGGGKKALYHCNYCNKDISGKIRIKCSKCPDFDLCVECFSVGAEVTPHRSNHPYRVMDNLSFPLICPDWNADEEILLLEGIEMYGLGNWAEVAEHVGTKTKAQCIDHYTTAYMNSPCYPLPDMSHVNGKNRKELLAMAKVQGESKKVLPGDLTPKDESPFSPPRVKVEDALGEGLAGRSPSHIAGGANKKASNVGQFKDGANVAKVEDGHVDRSIGVKKPRYSADEGPSLTELSGYNSKRHEFDPEYDNDAEQALAEMEFKETDSETDRELKLRVLRIYLSRLDERKRRKEFILERNLLFPNPLEKDLTNEDKEVYHRYKVFMRFLSKEEHEALVRSVLEERKIRRRIQELQECRSAGCRTLAEAKIHIEQKRKKEHEVNAQKAKESGQLLSNTKVVHKTNRPMKIESDGNLDQKKGGASLDSTGRDSPKTTGHAGTKHWDDWDIVGFPGAELLSTSEKNLCCQNRLLPNHYLKMQEVLMQEIFKGSVAKKEDAHVLFKVDPAKVDNVYDMVTKKLGTNEEAPTV

SEQ ID NO: 195 - DNA, 1683 bp, Populus trichocarpa
atgggtcgttctcgagggaattttcactctaatgatgaagaccctactcagagatcaagaaggaagaagaatgcggcaagtggagataattccgaatctttattggctggccaaggaagtggtgatgggaaaagggcattataccattgcaattattgcaataaagatataacagggaagacccgtatcaaatgcgctatgtgccctgattttgacctatgcttagagtgcttctctgtaggagctgaggttacacctcataaaagcaatcacccttacagggttatggataatttatctttcccgcttatttgccctgattggaatgcagatgaagaaatactgcttctagagggaattgaaatgtatggattggggaactgggcagaaattgctgagcacgtggggacaaagagtaaagacacatgtattgaacactataatagtgtttacatgcaatcccagtacttccctctcccggacatgtcgcttgttgttgggaaaaatagaaaggaacttcttgctatggccaagggatatagtgaggacaaaaaaggtgctgctatgcttggggatcttactttgaaggaagaatctccattttctccttcaagagtgaaagtcgaagaaatgcataaaggaggttcctctggccgattatcaacattaaactcagaggtagaatctgctggccgtcctactaccacaaactctgcagcaacagctgctaataagaaggcatctagcattgctcgggttaaagatggacctaatgttgttaaagtggaagatcctcaggtggaccgaaatgctaaagggaagaaaccgaattcctctgggagtgagggtccatctttaatggagttgagcggttataaccccaagaggcaggagtttgatcccgaatatgataatgatgctgagcagttgctagctgagatggaatttaaagatactgacactgaggaagagcgggagctgaaattgcgagtgctgcatatatattcaaagcggctcgacgagagaaagcgcagaaaagatttcatactagaaagaaatctgctgcaaccaagtccttttgaaaaggacttgactccagaagagagggcattatgtcggcgttatgaccctttcatgcgttttcattccaaggaagagcatgaggaattgcttcaggttgttatcgaagagcatcggatgctgaaaaggatcgaagagctgaaggaagctcaagcagctggttgccgcacagcagctgaggcggacaggtaccttgagcagaagaggaaaaaagaagccgaggaaaattccagtagactgaaagacaatgctctggttggtcctagcaaccatggtgctcccaatgcatttattccgtcagagtctgttaggaaggattcgagtactagacctgtaggacagggctctgctagctatgccaatggtttggacacaacaggcttttatgaaacgcagctactatctgaaactgaaaaacggctatgccgtgagattcacctacctcctcctgtctacctcaagatgcaagaggtcatgaccaaagagatcttcagcggtaacatcactaagaaattggatgctcaccccttgttcaagattgaagcaagcaaagttgatagggtgtatgatatacttgtgaagaaggggattgctcaaccttga

SEQ ID NO: 196 - protein, 540 aa, Populus trichocarpa
MGRSRGRPPSSGTSTAAAASDDPNNRSSKRKKTTSNVGSIETAFPAVYQEKGQGKLALYHCNYCHKDISGMVRIKCAVCPDFDLCVECFSVGAEVTPHKSNHPYRVMDNLSFPLFHPDWNTDEEILLLEGIEMYGFGNWTEVSEHAGTKSKSQCIDHYNAVYMDSPCFPLPDMSHVMGKTREELLAMARGNVEMKKEVSSHMGSSSGNTFSDAVKKASNEAQIKDKIKVEEPLSDRSIREKKPRICGEEGPSMTELSGYNFKRQEFEIEYDNDAEQLLADMEFKDTDTDAELDMKLQVLRIYSKRLDERKRRKDFILERNLFYPDAFEKNISPEEKEIYQRYKVFMRFHTKEEHEELMKTVIEDHQIMKRIQDLQEARAAGCQTAGEAQGFIEQKRKKEAEESAQRAKESMQAGPAGKLLPKPNHLDSSPRGAVKCSTVFHPGGNDSSSMIAKQAISSTLDEWDIAGFLGADLLSESDKRLCCELRILPAHYLNMLHIMSIEITKGTVTNKTDAHSLFKVESSKVDRVYDMLVKKGIALA

SEQ ID NO: 197 - DNA, 1623 bp, Populus trichocarpa
atgggtcgttcgcgcggtcgccctccttcttccggaacctccactgccgccgccgcctctgatgatccaaacaatagatcttcaaaaagaaaaaagacgacttccaatgtagggagtatagagactgcatttccagcagtatatcaagaaaagggtcaagggaaactggcactataccactgcaattactgtcataaagacatctctggaatggttcgcattaagtgtgcagtgtgtcctgatttcgacctttgcgttgagtgtttttctgttggagccgaagtgactcctcataaaagcaatcatccctacagggttatggacaatctgtcttttccgctctttcatccagactggaatacagatgaagagatattacttctagagggcattgaaatgtatggatttgggaactggactgaagtttcagaacatgctggaaccaagagcaaatctcaatgcattgatcactataatgctgtatacatggactccccatgctttcctctcccagacatgtctcatgttatgggaaaaacaagagaggagctccttgcaatggccagaggaaatgttgaaatgaagaaagaagtcagctctcatatgggttcaagcagtggcaacacattctcagatgcagttaagaaagcatctaacgaggcccagattaaggataagattaaagtggaagaacctctgtctgacaggagtattcgagagaaaaaacctagaatttgcggagaggaaggaccttcaatgacagagttaagtggctataatttcaagaggcaggaatttgagattgaatatgataatgatgcagagcaactactggcagatatggaattcaaagatactgacactgatgctgagcttgacatgaaactgcaagttctgcgcatttactcaaaaaggcttgatgagaggaaacggaggaaagattttattttggaaagaaatttgttttaccctgatgcatttgagaagaacatttcacctgaagagaaggaaatatatcagcgttacaaggtcttcatgaggttccacacaaaagaagagcatgaagaattgatgaagactgttattgaagatcatcagattatgaaaagaatacaagatcttcaggaagctcgagctgctggctgtcaaacagctggtgaggcccaaggatttattgagcagaagagaaagaaggaagccgaagaaagtgcccaaagagcgaaggaaagtatgcaagcaggcccagcaggtaaactgttgccaaagccaaatcatcttgacagcagccctcgtggagctgtcaagtgttccaccgtttttcatcctggtggcaacgactcatcttcaatgattgcaaaacaagcaatttcaagcaccctcgatgagtgggatattgctggattcctaggggctgatttgctctctgaatctgataagcgtctttgttgtgagttgagaatactacctgcacattatctcaacatgctgcacataatgtcaatagagataacaaagggtactgttaccaacaaaaccgatgctcatagcctgttcaaggtggaatcaagcaaagtggatagagtatatgatatgttagtgaaaaaggggattgctctagcatga

SEQ ID NO: 198 - protein, 560 aa, Populus trichocarpa
MGRSRGNFHSNDEDPTQRSRRKKNAASGDNSESLLAGQGSGDGKRALYHCNYCNKDITGKTRIKCAMCPDFDLCLECFSVGAEVTPHKSNHPYRVMDNLSFPLICPDWNADEEILLLEGIEMYGLGNWAEIAEHVGTKSKDTCIEHYNSVYMQSQYFPLPDMSLVVGKNRKELLAMAKGYSEDKKGAAMLGDLTLKEESPFSPSRVKVEEMHKGGSSGRLSTLNSEVESAGRPTTTNSAATAANKKASSIARVKDGPNVVKVEDPQVDRNAKGKKPNSSGSEGPSLMELSGYNPKRQEFDPEYDNDAEQLLAEMEFKDTDTEEERELKLRVLHIYSKRLDERKRRKDFILERNLLQPSPFEKDLTPEERALCRRYDPFMRFHSKEEHEELLQVVIEEHRMLKRIEELKEAQAAGCRTAAEADRYLEQKRKKEAEENSSRLKDNALVGPSNHGAPNAFIPSESVRKDSSTRPVGQGSASYANGLDTTGFYETQLLSETEKRLCREIHLPPPVYLKMQEVMTKEIFSGNITKKLDAHPLFKIEASKVDRVYDILVKKGIAQP

SEQ ID NO: 199 - DNA, 1680 bp, Populus trichocarpa
atgggtcgttctcgtgggaattttcactctactgatgaagaccctactcagagatcaagaaggaaaaagaacgctgcaagtggagagaattcggaatcttcatcggcaggccaaggaagtagtgatggtaaaagggcattataccattgcaattattgcaataaagacataacagggaagacccgtatcaaatgtgctgtgtgccctgattttgacctatgtttagagtgcttctctgtaggagctgaggttacgcctcataaaagcaatcacccttacagggttatggataacctatctttcccacttatttgccctgactggaatgcagatgaagaaatactgcttctagagggaattgaaatgtatggattggggaattgggcagaagttgctgagcatgtggggacaaagaataaagaaacatgtatcaaacactataatagcgtatacttgcaatcccagttcttccctctcccggacatgtctcatgttgttgggaaaaatagaaaggagcttcttgctatggccaagggacatagtgaggacaaaaaaggtacttctatgcttggggagcatactttgaaggaagaatctccattttctccttcaagagtcaaggtcgaagaaatgcataaagtaggttcctctggccgattatcaacattaaattcagagttagaaactgcgagccgtcctaatagcgcaaattctgcagcaacagctgctaataagaaggcatcaagcatggcccgaattaatgatggacccggtgttaaggtggaagatcctcaagtggaccgaaatttcaaggggaagaaaccaagttcctcagggagtgagggtccatcattaatggagttgagcggttataatcccaagaggcaggagtttgatcctgaatatgacaatgatgctgagcagttgctggctgagatggaatttaaagataatgacactgaggaagagcgtgagctgaagttgcgagtgctgcgtatatattcaaggaggcttgatgagagaaagcgcagaaaagatttcattcttgaaagaaatctactacatccaagtcctttcgaaaaggacttgactccagaagagagggcattatgtcggcgttttgaccctttcatgcgttttcattccaaggaagagcatgaagaactgcttcgggctgttgtcaaggagcactggatgctgaaaagggtcgaagagctgaaggatgcccaagtggctggttgccgcacagcagttgaggcagacaggtatcttgagcacaagagaaaaatagaagctgaggaaacttccaggagactgaaagacaatgctcagattggtcctagcagtcagggtgctcccaatgcattcatgtctccagactctgttgggaaggattcaagcaccagacctgcaggacagggctcttctagctatgccaatgatttggacataatgggcttttatgaaacgcagctactgtctgaaactgaaaaacggctatgctgcgagattcacctacctccacctgtctacctcaagatgcaggaggtgatgaccaaagagatcttcagcggtaacatcactaagaaatcagatgctcaccccttgttcaagattgaagcaagcaaagttgatggggtgtatgatatgcttgtgaagaaggggattgctcaaccttga

SEQ ID NO: 200 - protein, 559 aa, Populus trichocarpa
MGRSRGNFHSTDEDPTQRSRRKKNAASGENSESSSAGQGSSDGKRALYHCNYCNKDITGKTRIKCAVCPDFDLCLECFSVGAEVTPHKSNHPYRVMDNLSFPLICPDWNADEEILLLEGIEMYGLGNWAEVAEHVGTKNKETCIKHYNSVYLQSQFFPLPDMSHVVGKNRKELLAMAKGHSEDKKGTSMLGEHTLKEESPFSPSRVKVEEMHKVGSSGRLSTLNSELETASRPNSANSAATAANKKASSMARINDGPGVKVEDPQVDRNFKGKKPSSSGSEGPSLMELSGYNPKRQEFDPEYDNDAEQLLAEMEFKDNDTEEERELKLRVLRIYSRRLDERKRRKDFILERNLLHPSPFEKDLTPEERALCRRFDPFMRFHSKEEHEELLRAVVKEHWMLKRVEELKDAQVAGCRTAVEADRYLEHKRKIEAEETSRRLKDNAQIGPSSQGAPNAFMSPDSVGKDSSTRPAGQGSSSYANDLDIMGFYETQLLSETEKRLCCEIHLPPPVYLKMQEVMTKEIFSGNITKKSDAHPLFKIEASKVDGVYDMLVKKGIAQP

SEQ ID NO: 201 - DNA, 1722 bp, Vitis vinifera
atgggtcgttctcgcgcagttctgcattctactgacgatgatcaaggttcacacagatccaagagaagaaagactgcttcaacagcagacaatttagagggtgcaactgcaggccaaggaatgagtgaggggaagmgagcttcataccactgtaattattgcagcaaagatatctcaggaaagatccgtaccaaatgtgtagtttgtcccgattttgacctttgcattgaatgcttttccattggagctgaggttacacctcaygtatgctttcatccatatcgggtcatggacaatttatcgttcccactcatttgtcctgattggaatgcagatgaagagatgttacttctggagggaattgaaatgtacggactggggaactggagtgaagtttcagaacatgttggaaccaaaagaaaatcagaatgtatcgatcactatgttgctatatacatgaattccccatgctttcctcttcctgacatgtcccatgttcttggaaagactagggctgagctccttgccatggccaggggagaagatgaagtcaagaaaggatcccctacacatggggagttaactctgaaagtggaatctcccttatctgcaagagtcaagtacggcaaatgcatgctaaaatgtgtttctctcatctgtcagagatccaatccgacatggatttctagcagcactaaaacatctgcaggtgcagttaagagggcatctaacatggcccaggttaaggatggtcgtgataacattaaagtggaagaaactcaaacagacagaagtgttggagagaaaaagcctaggacctcgggggatgaggggccttctgtgacagagctgagtggatacaatttcaagaggcaagagtttgatgttgagtatgataatgatgctgagcagttactggctgatatggaattcaaggatgctgacactgatgctgagcatgaactgaaactgcaagttctgcatatttattccaaaaggcttgatgagaggaaacgcaggaaggatttcatattggaaagaaatctactttaccctgacccttttgagaagaacctctcacctgaagagagggacgtaaatcagcgcttcaaggtctttatgcggttccactcaaaagaagaacatgaggaactgcttagggttgtgctcgaggaacattggattcagaaaagaatacaagatcttcaggacgcccgagctgctggctgccgtacatctgctgaggcagagagatatcttgaagagaaagggaagaaagaagctgaagaaagtgcccaacaagcaaaggaaagtgctgaggctggtcctagtgggggtaaagtcttacagagggtgaacactgccaaaggagaatctgatggcagtcctcggggaggtggaagaggttctgcaggtctagaacctggaatcaaggacacttcttcaacaactgcaggacatgctatcttaagatccctagatgtttgggatatcactggatttccgggggaagatttactctcagaaactgagaaacagctttgcagtgagatcagaatcctcccttcacattatctcaacatgctgcacaccatgttgacagagacgttaaatggaaacatcaccaggaaatcagatgcccatggcctgttcaaggttgaaccaagcaaagtagacaaagtgtacgatatgtttgtgaagaagggaattgttaagtcatag

SEQ ID NO: 202 - protein, 573 aa, Vitis vinifera
MGRSRAVLHSTDDDQGSHRSKRRKTASTADNLEGATAGQGMSEGKRASYHCNYCSKDISGKIRTKCVVCPDFDLCIECFSIGAEVTPHVCFHPYRVMDNLSFPLICPDWNADEEMLLLEGIEMYGLGNWSEVSEHVGTKRKSECIDHYVAIYMNSPCFPLPDMSHVLGKTRAELLAMARGEDEVKKGSPTHGELTLKVESPLSARVKYGKCMLKCVSLICQRSNPTWISSSTKTSAGAVKRASNMAQVKDGRDNIKVEETQTDRSVGEKKPRTSGDEGPSVTELSGYNFKRQEFDVEYDNDAEQLLADMEFKDADTDAEHELKLQVLHIYSKRLDERKRRKDFILERNLLYPDPFEKNLSPEERDVNQRFKVFMRFHSKEEHEELLRVVLEEHWIQKRIQDLQDARAAGCRTSAEAERYLEEKGKKEAEESAQQAKESAEAGPSGGKVLQRVNTAKGESDGSPRGGGRGSAGLEPGIKDTSSTTAGHAILRSLDVWDITGFPGEDLLSETEKQLCSEIRILPSHYLNMLHTMLTETLNGNITRKSDAHGLFKVEPSKVDKVYDMFVKKGIVKS

SEQ ID NO: 203 - DNA, 1698 bp, Zea mays
atggggcggtcgcgaggggtgcagaattccggcgacgacgacaccgtacacaggtcgaagcggaggagggtcgcatcgggcggggatgcgacggactccgtttccgctggcatcgggggagctggagaaggagggggcaagaaagcgctctaccactgcaattactgcaacaaggacatctctgggaagatacggatcaaatgctccaagtgccctgacttcgacctttgcgtggagtgcttctctgttggcgctgaagtcaccccacatcgcagcaaccatccttacaaagtcatggacaacctgtctttcccacttatttgcccagattggaatgcagacgaagaaattctcctccttgagggaattgaaatgtatggtctgggaaactggcttgaagttgcagagcatgttggtaccaagtctaagttacagtgtattgatcattacacaacagcatacatgaactcaccttgttatcccctaccggatatgtctcatgttaatggcaagaacaggaaggagcttctagctatggctaaagtgcagggtgaaagtaaaaaagggacttcactgttgcctggagagctgactcctaaggctgaatctccattttctccctccagggtcaaggtggaagatgcacttggagaaggtctagcaggtcgatcaccttcgcacatagctgttggtgcaaataaaaaagcttcaaatgtgggacatattaaagatgggtctaatgtatcaaaagttgaagatggtcatgtcgatagaagtgttggtgtgaagaagcccagatattctgcagatgaaggcccttcgttgactgaactgagtggatacaatgcaaagagacacgagtttgacccagagtatgataatgatgccgaacaagcgcttgctgagatggaatttaaagaaactgattcagaaactgatcgtgaactgaaactccgtgtgctgcgtatttatctgtccaggcttgatgaaagaaaaaggagaaaagagttcatattggaaaggaatttattgtttcctaatcccttggagaaggatcttacaaatgaagacagggaagtttaccatcggtataaggtcttcatgcgttttctttccaaggaggaacatgaagcccttgttaggagtgtcattgaagagcgaaaaattcggaggagaattcaagaactccaggaatgtcgttctgctggatgccgcacacttgctgaagcaaagatacacatagagcaaaagaggaaaaaagaatacgagctgaatgcccaaaaagctaaggaaagtaaccaccttattgcaaatactaaattggtgcagaagatgaatcgacctatgaagattgagtctgatgggaatttggatccaaagaaaggtggtgttgcgttagattctcctaaaactacaggacttacaagtgttaagcagtgggatgactgggatatagttggtcttcctggggcgaagctattaagtgctagcgaaaagcttctatgttgccagaacagactgctacccagtcattacctgagaatgcaggaggtgctgatgcaggagatattcaagggtagtgtcctaaagaaggaagacgcacacgtcttgtttaaggttgatcctaccaaagtagatagtgtttatgatatggtaacaaaaaagctgggcaaccatgtggagttgcctacggtctag

SEQ ID NO: 204 - protein, 565 aa, Zea mays
MGRSRGVQNSGDDDTVHRSKRRRVASGGDATDSVSAGIGGAGEGGGKKALYHCNYCNKDISGKIRIKCSKCPDFDLCVECFSVGAEVTPHRSNHPYKVMDNLSFPLICPDWNADEEILLLEGIEMYGLGNWLEVAEHVGTKSKLQCIDHYTTAYMNSPCYPLPDMSHVNGKNRKELLAMAKVQGESKKGTSLLPGELTPKAESPFSPSRVKVEDALGEGLAGRSPSHIAVGANKKASNVGHIKDGSNVSKVEDGHVDRSVGVKKPRYSADEGPSLTELSGYNAKRHEFDPEYDNDAEQALAEMEFKETDSETDRELKLRVLRIYLSRLDERKRRKEFILERNLLFPNPLEKDLTNEDREVYHRYKVFMRFLSKEEHEALVRSVIEERKIRRRIQELQECRSAGCRTLAEAKIHIEQKRKKEYELNAQKAKESNHLIANTKLVQKMNRPMKIESDGNLDPKKGGVALDSPKTTGLTSVKQWDDWDIVGLPGAKLLSASEKLLCCQNRLLPSHYLRMQEVLMQEIFKGSVLKKEDAHVLFKVDPTKVDSVYDMVTKKLGNHVELPTV

SEQ ID NO: 205 - DNA, 1698 bp, Zea mays
atggggcggtcgcgaggggtgctgagttccggcgacgacgacaccgggcacaggtcgaagcggaggagagtctcgtcgggcggggatgcgacggactccatttcagcctccatcgggggagctggagagggagggggcaagaaggcgctctatcactgcaactactgcaacaaggacatctccgggaagatacggatcaagtgctccaagtgccctgacttcgacctttgcgtggagtgtttctctgtcggcgctgaagtcaccccgcaccgcagcaaccatccttacaaagtcatggacaacttgtctttcccacttatttgcccggattggaatgcagatgaagaaattctcctccttgagggaattgaaatgtatggtctgggaaactggcttgaagttgcagagcatgttggtaccaagtctaagttacagtgtattgatcattacacatcagcatacatgaactcaccttgttatcccctcccggatatgtctcatgttaatggcaagaataggaaggaacttctagctatggctaaagtacagggtgagagtaaaaaagggactttgctgttacctggagaactcactcctaaggttgaatctcaattttctccctccagggtcaaggtggaagatgcacttggagaaggtccagcaggtcgatcaccttcacacatggctgttggtgcaaataaaaaagcttcaaatgtgggacatattaaggatggcgctactgtatcaaaagtcgaagatgttcatgtagatagaagtgttggtgtgaagaagcccagatattctgcagatgaaggcccttcgttgactgaactgagtggatacaatgcaaagagacatgagtttgacccagaatacgataatgatgccgaacaagctcttgctgagatggaatttaaagaaactgattcggaaactgatcgtgaactgaaactccgtgtgctgcgtatttacctctccaggcttgatgaaagaaaaagaagaaaggagttcatattggaaagaaatttgttgttccctaatcccttggagaaggatcttacgagtgaagacagggaactttaccatcgctataaagtcttcatgcgttttctttctaaggaggaacatgaagccctcgttaggagtgttattgaggagcgaaaaattcggaggagaattcaagaactccaggaatgccgttctgctggatgccgcacactggctgaagcaaagatacacatagagcaaaagaggaaaaaagaatacgagctgaatgcgcaaaaagctaaggatagcagtcaacttaatgcaaataataaatcagtacaaaagatgaatcgacctatgaaaattgagtccgatgggaatttggatccaaagaaaggtggtgctggcttggattctcctaagacaacaggacctacaagtgttaagcagtgggatgactgggatatagttggtcttcctggggcagagctattaagtgctagcgaaaagcttctatgctgtcagaacagattgctacccagccattacctgagaatgcaggaggtgctgatgcaggagatattcaagggtagcgtcctaaagaaggaagacgcccacgtcttatttaaggtcgatcctaccaaagtagatagtgtttatgatatggtatctaaaaaactgggcaaccatgaggaggccccaaccgtctag

SEQ ID NO: 206 - protein, 565 aa, Zea mays
MGRSRGVLSSGDDDTGHRSKRRRVSSGGDATDSISASIGGAGEGGGKKALYHCNYCNKDISGKIRIKCSKCPDFDLCVECFSVGAEVTPHRSNHPYKVMDNLSFPLICPDWNADEEILLLEGIEMYGLGNWLEVAEHVGTKSKLQCIDHYTSAYMNSPCYPLPDMSHVNGKNRKELLAMAKVQGESKKGTLLLPGELTPKVESQFSPSRVKVEDALGEGPAGRSPSHMAVGANKKASNVGHIKDGATVSKVEDVHVDRSVGVKKPRYSADEGPSLTELSGYNAKRHEFDPEYDNDAEQALAEMEFKETDSETDRELKLRVLRIYLSRLDERKRRKEFILERNLLFPNPLEKDLTSEDRELYHRYKVFMRFLSKEEHEALVRSVIEERKIRRRIQELQECRSAGCRTLAEAKIHIEQKRKKEYELNAQKAKDSSQLNANNKSVQKMNRPMKIESDGNLDPKKGGAGLDSPKTTGPTSVKQWDDWDIVGLPGAELLSASEKLLCCQNRLLPSHYLRMQEVLMQEIFKGSVLKKEDAHVLFKVDPTKVDSVYDMVSKKLGNHEEAPTV

SEQ ID NO: 207 - protein, 46 aa, Artificial sequence
  Zinc finger ZZ type
KPGLYCCNYCDKDLSGLVRFKCAVCMDFDLCVECFSVGVELNRHKN

SEQ ID NO: 208 - protein, 49 aa, Artificial sequence
  SANT DNA binding domain
VTSDWNADEEILLLEAIATYGFGNWKEVADHVGSKTTTECIKHFNSAYM

SEQ ID NO: 209 - protein, 13 aa, Artificial sequence
  calcium binding EF hand
DNDAEQLLADMEF

SEQ ID NO: 210 - protein, 88 aa, Artificial sequence
  SWIRM domain
PRIYSGLDTWDVDGLLGADLLSETEKKMCNETRILPVHYLKMLDILTREIKKGQIKKKSDAYSFFKVEPSKVDRVYDMLVHKGIGDST

SEQ ID NO: 211 - DNA, 55 bp, Artificial sequence
  primer 1
ggggacaagtttgtacaaaaaagcaggcttaaacaatgggtcgttcgaaactagc

SEQ ID NO: 212 - DNA, 52 bp, Artificial sequence
  primer 2
ggggaccactttgtacaagaaagctgggtcatgttaggaccatgaagctatg

SEQ ID NO: 213 - DNA, 1130 bp, Oryza sativa
catgcggctaatgtagatgctcactgcgctagtagtaaggtactccagtacattatggaatatacaaagctgtaatactcgtatcagcaagagagaggcacacaagttgtagcagtagcacaggattagaaaaacgggacgacaaatagtaatggaaaaacaaaaaaaaacaaggaaacacatggcaatataaatggagaaatcacaagaggaacagaatccgggcaatacgctgcgaaagtactcgtacgtaaaaaaaagaggcgcattcatgtgtggacagcgtgcagcagaagcagggatttgaaaccactcaaatccaccactgcaaaccttcaaacgaggccatggtttgaagcatagaaagcacaggtaagaagcacaacgccctcgctctccaccctcccacccaatcgcgacgcacctcgcggatcggtgacgtggcctcgccccccaaaaatatcccgcggcgtgaagctgacaccccgggcccacccacctgtcacgttggcacatgttggttatggttcccggccgcaccaaaatatcaacgcggcgcggcccaaaatttccaaaatcccgcccaagcccctggcgcgtgccgctcttccacccaggtccctctcgtaatccataatggcgtgtgtaccctcggctggttgtacgtgggcgggttaccctgggggtgtgggtggatgacgggtgggcccggaggaggtccggccccgcgcgtcatcgcggggcggggtgtagcgggtgcgaaaaggaggcgatcggtacgaaaattcaaattaggaggtggggggcggggcccttggagaataagcggaatcgcagatatgcccctgacttggcttggctcctcttcttcttatcccttgtcctcgcaaccccgcttccttctctcctctcctcttctcttctcttctctggtggtgtgggtgtgtccctgtctcccctctccttcctcctctcctttcccctcctctcttcccccctctcacaagagagagagcgccagactctccccaggtgaggtgagaccagtctttttgctcgattcgacgcgcctttcacgccgcctcgcgcggatctgaccgcttccctcggccttctcgcaggattcagcc

SEQ ID NO: 214 - DNA, 1244 bp, Oryza sativa
aaaaccaccgagggacctgatctgcaccggttttgatagttgagggacccgttgtgtctggttttccgatcgagggacgaaaatcggattcggtgtaaagttaagggacctcagatgaacttattccggagcatgattgggaagggaggacataaggcccatgtcgcatgtgtttggacggtccagatctccagatcactcagcaggatcggccgcgttcgcgtagcacccgcggtttgattcggcttcccgcaaggcggcggccggtggccgtgccgccgtagcttccgccggaagcgagcacgccgccgccgccgacccggctctgcgtttgcaccgccttgcacgcgatacatcgggatagatagctactactctctccgtttcacaatgtaaatcattctactattttccacattcatattgatgttaatgaatatagacatatatatctatttagattcattaacatcaatatgaatgtaggaaatgctagaatgacttacattgtgaattgtgaaatggacgaagtacctacgatggatggatgcaggatcatgaaagaattaatgcaagatcgtatctgccgcatgcaaaatcttactaattgcgctgcatatatgcatgacagcctgcatgcgggcgtgtaagcgtgttcatccattaggaagtaaccttgtcattacttataccagtactacatactatatagtattgatttcatgagcaaatctacaaaactggaaagcaataagaaatacgggactggaaaagactcaacattaatcaccaaatatttcgccttctccagcagaatatatatctctccatcttgatcactgtacacactgacagtgtacgcataaacgcagcagccagcttaactgtcgtctcaccgtcgcacactggccttccatctcaggctagctttctcagccacccatcgtacatgtcaactcggcgcgcgcacaggcacaaattacgtacaaaacgcatgaccaaatcaaaaccaccggagaagaatcgctcccgcgcgcggcggcgacgcgcacgtacgaacgcacgcacgcacgcccaaccccacgacacgatcgcgcgcgacgccggcgacaccggccgtccacccgcgccctcacctcgccgactataaatacgtaggcatctgcttgatcttgtcatccatctcaccaccaaaaaaaaaaggaaaaaaaaacaaaacacaccaagccaaataaaagcgacaa

SEQ ID NO: 215 - DNA, 1482 bp, Arabidopsis thaliana
atgttttttggaccaagtgagtttgatgctgatgaaatgggttatgcaatgagtagacttgagatagaatccgatctatgtgatactggaaaagacgtttgtggagttggtagtagtagtggtagtcacagatcaagtgaacatttggctgatctagaccatgaaatcagccaggttactaaattgaaatctagtcctcatcaacggtatagccgtgaagtccctgggagacatcagttacctgtgtctactgtgaggatgttggcaggtcgagaaagtaatttctctggaagaggaaggttttcagccgctgattgttgccatatgctaagcagatatttgcctacaaaaggtccttggcttgtagatcaaatggacagccgagcatatgtctctcagttttcaactgatggttctctctttattgcggggtttcagggtagccgtattcggatttacaatgtagagaagggttggaaagttcaaaaggatattcttgcaaaaagcttgcgttggactgttactgatacttctctatcccctgatcagcgaaatctggtttacgcaagcatgtcacctattgttcacattgttgatgttggatccggttcaaccgagtctcatgcaaatgttacggagatccatgatggcttagacttctcttctgatgaagatggagggtactcttttggaatattctctgtgaaattttcaacagatggccgagaagttgttgctgggagcagtgatgattccatttatgtttatgaccttgaagcaaatcgagtttcactccggactgttgcacacacgtctgatgtaaatactgtgtgctttgctgatgaaagtgggaacctgattttatctggaagtgatgataatctctgcaaagtgtgggataggcgttgtttcattgggagagataagccagctggtgttttagtgggacacctcgaaggtgttacctttatcgatagccgtggagatggtcgctatttcatatcaaatggtaaagaccaaactatcaaattgtgggatatcagaaaaatgtcctcaagcgcacctgcaaggcatgaggtgctaagaaactatgaatgggactacagatggatggattatcctactgaagcaagagatctaaagcacccactcgatcagtcagtgtcgacatataaaggtcactcagttttgcgtactctcatccgttgttacttctctccagcgcatagtactggccaaaagtacatctacacaggatcgaacgacagttccgtctacatatacgacttggtaagtggagataaagtggcagtgctaaagcaccatagctcacctgtaagagactgtaattggcacccatattacccaacgcttataagctcttcgtgggacggagatcttgtgaagtgggaatttccggggagcggtgaggcgccgattatgagtaagaagagggttcgaaggagacatttctactactga

SEQ ID NO: 216 - protein, 493 aa, Arabidopsis thaliana
MFFGPSEFDADEMGYAMSRLEIESDLCDTGKDVCGVGSSSGSHRSSEHLADLDHEISQVTKLKSSPHQRYSREVPGRHQLPVSTVRMLAGRESNFSGRGRFSAADCCHMLSRYLPTKGPWLVDQMDSRAYVSQFSTDGSLFIAGFQGSRIRIYNVEKGWKVQKDILAKSLRWTVTDTSLSPDQRNLVYASMSPIVHIVDVGSGSTESHANVTEIHDGLDFSSDEDGGYSFGIFSVKFSTDGREVVAGSSDDSIYVYDLEANRVSLRTVAHTSDVNTVCFADESGNLILSGSDDNLCKVWDRRCFIGRDKPAGVLVGHLEGVTFIDSRGDGRYFISNGKDQTIKLWDIRKMSSSAPARHEVLRNYEWDYRWMDYPTEARDLKHPLDQSVSTYKGHSVLRTLIRCYFSPAHSTGQKYIYTGSNDSSVYIYDLVSGDKVAVLKHHSSPVRDCNWHPYYPTLISSSWDGDLVKWEFPGSGEAPIMSKKRVRRRHFYY

SEQ ID NO: 217 - DNA, 1458 bp, Aquilegia formosa x Aquilegia pubescens
atgtttgttacagccagtggggttgacattgatgaaatggggtacgccatgagtaggctagagatagaatccgagttgttcgatggcggtaataccgtccatgaagccagtagcagtactaggcccggcaaactgtttcctaaagtagatgacgagatttcccagcttacaaacctcagatcagggcctaatgatcgactgcatcaacttgtgcccggaaagcagcaattacctgtttccccggtgaggatgttggcaggtcgagaaagtaattattcaggaaagggaaggttctcgtcagcggatcgttgtcacatgcttagcaggtatttgcctgtaaatggtccttggcttgtggaccagacgaccagtcgggcctatgtttctcaattttcagctgatggttctctatttgttgccgggtttcagggaagcgatattagaatatacaatgtggatagaggctggaaagttcagaagaacattcttgccaaaagtttgcgttggactgttactgacacatccctttcccctgatcagcgccatcttgtttataccagtatgtcacccatagtccatattgttaatgttgggtctgctaccacggaatcccttgcaaatataacagaggtccatgaaggattggacttctctgctgctgatggagggtattcttttggaatattctctgtgaaattttcaaccgatggacgagaacttgttgctggaagcagtgatgattcgatatatgtttatgatcttgaagcaaacaagctttcccttcgaattgcggcacacatggctgatgttaatactgtaacctttgctgatgaaagtggtaatctgatatattcaggaagtgatgataatctctgcaaggtgtgggacaggcgttgtctcagagcaaagggaaaaccagcaggggttttgacggggcatttagaaggcattacgtttattgatagccgtggagatggtcgatattttatatcaaatggaaaagaccaggccattaaactttgggacatcaggaaaatgtcggctaatgctagttgcattgcaaaatctagaaattacgaatgggactacagatggatggaatacccaactgaggcgagaaagttaaaacatccttgtgatcagtctttggctacatacaaagggcactctgtcttgcgtactctcatccgttgttacttttcaccggcttacagcactggccagaagtacatctacaccggatcaaatgatggttgcgtttatatatatgatttggtaagtggagcccaagttgctcgactagatcatcattcatccactgtgagggattgtagttggcaccctttctacccaacgcttgtcagcagttcatgggatggggtccttgccagatgtgaatttcctggcaatggagaaaaaattcggctgaagagaagcaggaggagatatgaatcttga

SEQ ID NO: 218 - protein, 485 aa, Aquilegia formosa x Aquilegia pubescens
MFVTASGVDIDEMGYAMSRLEIESELFDGGNTVHEASSSTRPGKLFPKVDDEISQLTNLRSGPNDRLHQLVPGKQQLPVSPVRMLAGRESNYSGKGRFSSADRCHMLSRYLPVNGPWLVDQTTSRAYVSQFSADGSLFVAGFQGSDIRIYNVDRGWKVQKNILAKSLRWTVTDTSLSPDQRHLVYTSMSPIVHIVNVGSATTESLANITEVHEGLDFSAADGGYSFGIFSVKFSTDGRELVAGSSDDSIYVYDLEANKLSLRIAAHMADVNTVTFADESGNLIYSGSDDNLCKVWDRRCLRAKGKPAGVLTGHLEGITFIDSRGDGRYFISNGKDQAIKLWDIRKMSANASCIAKSRNYEWDYRWMEYPTEARKLKHPCDQSLATYKGHSVLRTLIRCYFSPAYSTGQKYIYTGSNDGCVYIYDLVSGAQVARLDHHSSTVRDCSWHPFYPTLVSSSWDGVLARCEFPGNGEKIRLKRSRRRYES

SEQ ID NO: 219 - DNA, 1488 bp, Brassica napus
atgttttctggaccaagtgattctgatactgatgaaatgggttatgcaatgagtagactcgagattgaatccgatctatgcgacgctggaaagggctattacggtgttggtagcagcagtggtagtagtcacagatcgagtgagcgtttgggtgatttagacaatgagatcagccaagtcactaagctgaagtcttgtcctcatgaacggtttagccgtcaagtacccgggaggcatcagttgcctgtttccactgtgaagatgttggctggtcgtgagagtaacttctctggaagaggaggaaggttttcttcagctgatcgttgtcatatcttgagtagatatttgcctgttaagggtccttggcttgtggatcagatggacagccgagcttatgtctctcagttttcaactgatgggtctctcttcattgctgggtttcagggaagccatattcggatttacaatgtagagaaaggttggaaagttcaaaaggatattcttgcaaagagcttgcgttggactgttactgatacttctctgtcccctgatcagcgaaacctggtttatgcaagcatgtcacctattgttcacatagtcgatgttggatctggtacaaccgagtctcacgcaaatgtcacggagatccatgatggattagacttctcttctgaagaagatggaggctactcttttgggatattctctgtgaaattttcaacagatggacgagaactcgttgctggtagcagtgatgattccatttacgtttatgatctcgaagcaaaccgagtctcactccggactgttgcacacacgtctgatgtgaacactgtgtgtttcgccgatgaaagtggacacctgattctctctggaggtgatgataatctctgcaaggtgtgggataggcgttgtttcattgggagagataagccagctggtgttctggtgggacacctagaaggtgttacatttatcgatagccgcggagatggtcgctatttcatatcaaatgggaaagaccaaaccatcaagctatgggatattagaaaaatgtcctcaactgtacctgcaaggaatgaggtgcacagaaactatgaatgggattacagatggatggattacccttcggaggcaagagatctaaagcacccttatgatcagtctgtgtctacatataagggtcactcagtgttgcgtactctcatccgttgctacttctctccagctcatagtactggtcaaaagtacatatacacaggatccaacgacagttctgtctacatatatgacttggaaagtggagataaagcggcggtgttaaagcaccatagctcacctgtgagagactgtaactggcatccgcattatccgacgcttataagctcgtcgtgggacggagatcttgtgaaatgggagtttcctgggagcggtgaggcgccgatcatgagcaagaagagggtccgaaggagacatttctactactga

SEQ ID NO: 220 - protein, 495 aa, Brassica napus
MFSGPSDSDTDEMGYAMSRLEIESDLCDAGKGYYGVGSSSGSSHRSSERLGDLDNEISQVTKLKSCPHERFSRQVPGRHQLPVSTVKMLAGRESNFSGRGGRFSSADRCHILSRYLPVKGPWLVDQMDSRAYVSQFSTDGSLFIAGFQGSHIRIYNVEKGWKVQKDILAKSLRWTVTDTSLSPDQRNLVYASMSPIVHIVDVGSGTTESHANVTEIHDGLDFSSEEDGGYSFGIFSVKFSTDGRELVAGSSDDSIYVYDLEANRVSLRTVAHTSDVNTVCFADESGHLILSGGDDNLCKVWDRRCFIGRDKPAGVLVGHLEGVTFIDSRGDGRYFISNGKDQTIKLWDIRKMSSTVPARNEVHRNYEWDYRWMDYPSEARDLKHPYDQSVSTYKGHSVLRTLIRCYFSPAHSTGQKYIYTGSNDSSVYIYDLESGDKAAVLKHHSSPVRDCNWHPHYPTLISSSWDGDLVKWEFPGSGEAPIMSKKRVRRRHFYY

SEQ ID NO: 221 - DNA, 1428 bp, Glycine max
atgagttggttgaataaaaataaaagtacttgtagtgatggtagtgccaataatgaatcttcttcaagtggaatagttggagaaagggataatcatcttgatcatgaaattgcacagctcacaaaacttaggtcaagtcctcatgagcttttgggtcgtgttgttcctggtaagatgaggttacctgcatctactgtgagaatgctggttggtagagaaggtaattattctggaagagggagattttcatcagcagatgggtgtcatgtgttaagccgctatttgcctaccaaaggtccttggattgtggatcggatgaaaagtcgtgcctatgtttcacagttttctgctgatggttctcttttaattgctggattccagggaagccacatcaggatctatgatgttgaccagggctggaaagttaaaaaggacatttctgctagaaagttacggtggacagttactgatacatctctctcgccagatcaactctatcttgtttatgccagtatgtcaccaattatccatattgttaccgtgggatctggcacaacagaatcaatagcaaatgttacagaaattcactatggattaaatttctcttctgataatggtgatgatgaatttggaattttctctgtcaaattttcaacggatgggcgagagcttgtggctggaactagtgattgctcgatatgtgtatatgatcttggagcagataagctgagccttagaattcctgctcaccagtctgatgttaacactgtctgctttgctgatgaatctggccatctaatattttccggtagtgatgatagttttatcaaggtgtgggataggcgttgttttgtcgccaaaggacaaccagctggtatcttaatgggacatttagaaggcattacattcattgatagccgtggggatggtcgatatttaatttctaatggaaaagatcaaactaccaaattatgggatataaggaagatgtcttctaatgcaataaatcttggccttggagatgatgagtgggactatcgatggatggactaccctgaatatgcaagaaatttaaagcatcctcatgatcagtcattagcaacatataaaggtcactcagtgttgcgtactttagtgcgctgttatttctctccttcgtatagcactggtcaaaagtacatttacacagggtctagtgattcatctgtttacatatatgacctggtaagtggtgcacaagttgcaaaacttgatcatcatgaggcacctgtaagggattgtagttggcacccctattatccaatgatgatctcttcggcttgggatggtgatgttgtcaggtgggaatttcctgggagtgatgaagcccctgcttctccaaataaaagagaaggtcgaattcgtaggagaaatttgctttatctatag

SEQ ID NO: 222 - protein, 475 aa, Glycine max
MSWLNKNKSTCSDGSANNESSSSGIVGERDNHLDHEIAQLTKLRSSPHELLGRVVPGKMRLPASTVRMLVGREGNYSGRGRFSSADGCHVLSRYLPTKGPWIVDRMKSRAYVSQFSADGSLLIAGFQGSHIRIYDVDQGWKVKKDISARKLRWTVTDTSLSPDQLYLVYASMSPIIHIVTVGSGTTESIANVTEIHYGLNFSSDNGDDEFGIFSVKFSTDGRELVAGTSDCSICVYDLGADKLSLRIPAHQSDVNTVCFADESGHLIFSGSDDSFIKVWDRRCFVAKGQPAGILMGHLEGITFIDSRGDGRYLISNGKDQTTKLWDIRKMSSNAINLGLGDDEWDYRWMDYPEYARNLKHPHDQSLATYKGHSVLRTLVRCYFSPSYSTGQKYIYTGSSDSSVYIYDLVSGAQVAKLDHHEAPVRDCSWHPYYPMMISSAWDGDVVRWEFPGSDEAPASPNKREGRIRRRNLLYL

SEQ ID NO: 223 - DNA, 1467 bp, Gossypium hirsutum
atgtttgttacagccagtggggttgacattgatgaaatggggtacgccatgagtaggctagagatagaatccgagttgttcgatggcggtaataccgtccatgaagccagtagcagtactaggcccggcaaactgtttcctaaagtagatgacgagatttcccagcttacaaacctcagatcagggcctaatgatcgactgcatcaacttgtgcccggaaagcagcaattacctgtttccccggtgaggatgttggcaggtcgagaaagtaattattcaggaaagggaaggttctcgtcagcggatcgttgtcacatgcttagcaggtatttgcctgtaaatggtccttggcttgtggaccagacgaccagtcgggcctatgtttctcaattttcagctgatggttctctatttgttgccgggtttcagggaagcaatattaggatatacaatgtggatagaggttggaaagttcaaaagaacattcttgctaaaagtttgcgttggacagttaccgacacatccctttctccggatcagcggtaccttgtttataccagcatgtcgcctgtagttcacattgttaatgttgggtcttctaccacggaatcctttgcaaatgtcacggagatccacgaaggattggacttttcttctaatgatcgaaggtattcttttggaatattctccgtgaaattttcaactgatggacgagaacttgtggctggaagcagtgatgactcgatatatgtttatgatctggaagcaaacaagctttcccttcgaattatggcacacacggctgatgttaacacggcaacctttgccgatgaaagcggcaatttgatatattctgggagtgatgattatctctgcatggtgtgggataggcgttgctttggagcaaaagataagccggcaggagttttggtgggacacctggaaggtattacattcctcgacagtcgtggggatggtcgttacttcatatcaaacggtaaagatcagactatcaagctttgggatatccggaaaatgtcctccgatacctcttgcaatttagggtatcggaatttcgaatgggattacagatggatggactaccctccacaggctagagatttgaaacacccaagtgacggatcagtggctacttataaaggtcactcagtgttgcgcactcttattcgctgttatttttcacccgaatactgcacgggccaaaagtacatttacaccggatctcacgattctcgggtttatatttatgatgtggtcaccggagcccaagttgcggtactgaagcaccatacatcaccagtaagagactgtagttggcacccgcattaccctgtgttggtcagctcctcttgggacggggacgtggttaagtgggaattccctggtaaaggagaagcgccggtccttgcgaacgagaggagagtcaggaggcaatatcacgattga

SEQ ID NO: 224 - protein, 488 aa, Gossypium hirsutum
MFVTASGVDIDEMGYAMSRLEIESELFDGGNTVHEASSSTRPGKLFPKVDDEISQLTNLRSGPNDRLHQLVPGKQQLPVSPVRMLAGRESNYSGKGRFSSADRCHMLSRYLPVNGPWLVDQTTSRAYVSQFSADGSLFVAGFQGSNIRIYNVDRGWKVQKNILAKSLRWTVTDTSLSPDQRYLVYTSMSPVVHIVNVGSSTTESFANVTEIHEGLDFSSNDRRYSFGIFSVKFSTDGRELVAGSSDDSIYVYDLEANKLSLRIMAHTADVNTATFADESGNLIYSGSDDYLCMVWDRRCFGAKDKPAGVLVGHLEGITFLDSRGDGRYFISNGKDQTIKLWDIRKMSSDTSCNLGYRNFEWDYRWMDYPPQARDLKHPSDGSVATYKGHSVLRTLIRCYFSPEYCTGQKYIYTGSHDSRVYIYDVVTGAQVAVLKHHTSPVRDCSWHPHYPVLVSSSWDGDVVKWEFPGKGEAPVLANERRVRRQYHD

SEQ ID NO: 225 - DNA, 1464 bp, Helianthus annuus
atgtactctaggggttggaccacacttataggtgacatgggatatgccctaagtagattggaaatcgacccagattattctgataacggatctgttggagacgataatgacagccaccagtcttcatcacaaaatgatgtggatcctgaagttgctcagttaacaaagctgaaatcagcaccccatgatggattgaaacgcgttcttccacgaaggggggaatttgatgtttcgcctgtgaagatgttagcgggtcgagaagggaattattcgggtcgtgggaagttttctttagcagatcgttgtcatatgctaaacaaatatttacctgttaaaggtccttctattgttgaccaattgaccacccgggcttatgtctcacagttttcaaaagacgggtccctttttgttgctgcatttcagggaagtcagattaaaatttataatgctgaaatggggtggaaacttcacaagaaaattgttgctgaaagctttaattggacggttactgacacatctatttcaccagataaacgtttcctgatttattcaactttgtctcctatagtcaacattgtaaatattggatctgctggaacagagtctcatgcaaatgtcacggacatacacgaagggctagaatttgcagctgatgatgaagaaggatatgcatttggaattttttctgtaaaattttctagtgatggtagagaacttgtagccggaagtagtgatgattcaatttatgtttatgatattgaagcaaaaagattttcccttcgaattcaagcgcatacgtcagatgtaaacagtgtatgctttgctgatgaagccagcaatctgatatattctgggagtgatgataatctctgtaaggtttgggacagacgttccatcagatcaaaaggaaagccagttggaatcctcacggggcatctagaaggaattacacatcttgatagccgtaatgatggtcgttatttcatttcaaatggaaaagatcagactattaagctttgggatatcagaaaaatgtcctctaatgcggctcgcgctcctatatccaggaactatgaatgggactacagatggatggactatctacttagggcacgagatgtaaagcatccatctgaccagtccgttgctacatacaaaggtcattcagtattgcgtacactcatacgctgctatttttcaccagaatatagcactggccaaaggtatatttatactggatctcatgattcttgtgtgtatgtttatgatttggttactggggcccgggttgcaagacttgtgcaccataagtcaaccgtgcgggactgcagctggcacccttactatccaatgctcgtcagttcttcgtttgatggagatatcgcaaagtgggaatttcctggaaacggagagaacccgattcccgtgaataacagtaggcctcgacgacaatattatgattaa

SEQ ID NO: 226 - protein, 487 aa, Helianthus annuus
MYSRGWTTLIGDMGYALSRLEIDPDYSDNGSVGDDNDSHQSSSQNDVDPEVAQLTKLKSAPHDGLKRVLPRRGEFDVSPVKMLAGREGNYSGRGKFSLADRCHMLNKYLPVKGPSIVDQLTTRAYVSQFSKDGSLFVAAFQGSQIKIYNAEMGWKLHKKIVAESFNWTVTDTSISPDKRFLIYSTLSPIVNIVNIGSAGTESHANVTDIHEGLEFAADDEEGYAFGIFSVKFSSDGRELVAGSSDDSIYVYDIEAKRFSLRIQAHTSDVNSVCFADEASNLIYSGSDDNLCKVWDRRSIRSKGKPVGILTGHLEGITHLDSRNDGRYFISNGKDQTIKLWDIRKMSSNAARAPISRNYEWDYRWMDYLLRARDVKHPSDQSVATYKGHSVLRTLIRCYFSPEYSTGQRYIYTGSHDSCVYVYDLVTGARVARLVHHKSTVRDCSWHPYYPMLVSSSFDGDIAKWEFPGNGENPIPVNNSRPRRQYYD

SEQ ID NO: 227 - DNA, 1410 bp, Hordeum vulgare
atggcagcggcagggaggctgcggggacggcggcgggcgcagaaggaggtggagcgcgagctcgagccgttcactatcgaggaagaggtgtcccacctcacccgggctttgtcggagccgtgcccgggcacccgcgccgccgtccgtggcgccaggcggaagaggggcgtctcggctttcgacatgctgtcgtcgagggagtccggccggtccggtggcggcgggttctgctcggccgaccgcgcctacgccgccgggaggcacctgcccgcggtagggccgtggtgcgtcgaagacatggatagcgaggcctatgtttcgcagttctccagcgatggctcactgctcgttgctgggtttcggggaagccgcatcagagtttacgatgtcgataaagggtggaaggtgcataagaacataagctgcagaagtatgaggtggacggtttcagacattgctctctcccctgaccagcgataccttgcttattccagtttgtcgcctattgttcacattgtgaatgtgcagaatgctggaagggaatcatatgctaatgttactgaaattcacgagggtttggaattctgtgatgatgatgaatactctttcgggatattctctgtgaaattttcgaaagatggtagagaagttgttgttgggaacaatgattgttcaatatatgtctatgatcttggagcaaataaagtatcagaccgtatccgtgctcatatgggtgatgtcaacacggttacctttgctgatgaaagtggcaatttgttgtactctggaagtgatgataatctctgtaaggtctgggataggcgttgccttgtaagagagaaaccagcaggtgttttgacaggtcatttagatgggattacatttattgatagccgtggtgatgggcgttatctaatctcgaactgcaaggaccagactatcaaactttgggacgtcagaaagatgtccgccaccgtcaaaggacgacaaccgagattatatgactgggactacagatggatgtcgctcccatcacacgctagatattataagcatccagatgatctgtctctggcaacttacaggggtcattcagttctgcggacacttatccgctgctacttctctccaatgcacagcacgggccagaggtacatatacactggatcaagtgatgattcagtgcatatttacgatgtggtaaccggggcgaccgtcaagaagctctcgtggcacggttcgatcatcagagactgcacctggcatccttaccgtccaacacttgtcagctcttcctgggacggctatctggcccggtgggaggcatcaggcgacaacgaggacccctcggtgctcacgtgcgacgagcagaggaatagcccttaccacgagacatacgggctgttgtaa

SEQ ID NO: 228 - protein, 469 aa, Hordeum vulgare
MAAAGRLRGRRRAQKEVERELEPFTIEEEVSHLTRALSEPCPGTRAAVRGARRKRGVSAFDMLSSRESGRSGGGGFCSADRAYAAGRHLPAVGPWCVEDMDSEAYVSQFSSDGSLLVAGFRGSRIRVYDVDKGWKVHKNISCRSMRWTVSDIALSPDQRYLAYSSLSPIVHIVNVQNAGRESYANVTEIHEGLEFCDDDEYSFGIFSVKFSKDGREVVVGNNDCSIYVYDLGANKVSDRIRAHMGDVNTVTFADESGNLLYSGSDDNLCKVWDRRCLVREKPAGVLTGHLDGITFIDSRGDGRYLISNCKDQTIKLWDVRKMSATVKGRQPRLYDWDYRWMSLPSHARYYKHPDDLSLATYRGHSVLRTLIRCYFSPMHSTGQRYIYTGSSDDSVHIYDVVTGATVKKLSWHGSIIRDCTWHPYRPTLVSSSWDGYLARWEASGDNEDPSVLTCDEQRNSPYHETYGLL

SEQ ID NO: 229 - DNA, 1479 bp, Linum usitatissum
atgttcttcgtagcttcaactgacgggatgggttatgccatgagtagattggagatagaatctcagctgtgtgacgaggaagagactgtcaatgaagttggtggtggaagccaacagcacaagtctcttaacaaatcggtagagaaattggaccatgaagttgcccaggacactaacctaaaatctcagccccatagacggctcgagaaggagatacctgggaagagacagttcccagtctctcctgtaaagatgttggccggtcgagaaggtaatttttccggaagggggaggttctcgcgagctgatcggtgtcatatgctcagcagatatttgcctgctgatggcccatggcttgtcgatcgaatgaatagccgagcttatgtctcgcagttttcttctgatggtaccttgtttgttgctggctttcagggaagccatattaaagtatacaatgtcgagaaagggtggaaagttcagaaggatattattgccagaagtttgcgttggacagttacggatacctctctgtctccggatcaacggtttcttgtctatgccagtatgtgccctattgtgcacattgttaatatcgcatcatcaacaacggaatcagttgcaaatgtaacggagattcacgatggtttagacttttctgatgaagacgatgggggctatgctttcgggatcttctcagtaaaattttctactgatggtcgtgaactagttgctggaagtagtgatgatgctatatgtgtctatgatctcgaaactaataagctctctctcagaatcctagcacacacatctgatgtgaacaccgtctgttttgctgacgagagtgggcatctgatatactccgggagtgatgataatctctgcaaggtgtgggatagacgttgcttcatagcaaaagggaagcctgcaggagtcctaacgggacatatcgaaggaattacagatatagacagccgtggagatggccgatatttaatatcaaatggaaaagatcagacaatcaaactttgggatatcaggaaaatggcccccaatgctacaagctctttagggatcaggaattatgaatgggattacagatggatggactacccaccaccagctagagacttgaagcatccatgcgatctgtccgtggctacttataaaggtcactcggttctccgaacgcttattcgctgctatttctcaccaacctatagcaccggccagaaatacatttacaccggatctcacgactcttctgtttatatttatgatgtggcgactggggaggtagctggagtgctgaaacaccataactcgccggtaagagattgcagttggcacccgcactatcctatgctggtgagctcttcatgggatggggatatagtgaggtgggagttcgtcggcaatggagaagctccgatgcctatggccaagaaacgactacgcagaaggcaatactacgatgtctga

SEQ ID NO: 230 - protein, 490 aa, Linum usitatissum
MFFVASTDGMGYAMSRLEIESQLCDEEETVNEVGGGSQQHKSLNKSVEKLDHEVAQDTNLKSQPHRRLEKEIPGKRQFPVSPVKMLAGREGNFSGRGRFSRADRCHMLSRYLPADGPWLVDRMNSRAYVSQFSSDGTLFVAGFQGSHIKVYNVEKGWKVQKDIIARSLRWTVTDTSLSPDQRFLVYASMCPIVHIVNIASSTTESVANVTEIHDGLDFSDEDDGGYAFGIFSVKFSTDGRELVAGSSDDAICVYDLETNKLSLRILAHTSDVNTVCFADESGHLIYSGSDDNLCKVWDRRCFIAKGKPAGVLTGHIEGITDIDSRGDGRYLISNGKDQTIKLWDIRKMAPNATSSLGIRNYEWDYRWMDYPPPARDLKHPCDLSVATYKGHSVLRTLIRCYFSPTYSTGQKYIYTGSHDSSVYIYDVATGEVAGVLKHHNSPVRDCSWHPHYPMLVSSSWDGDIVRWEFVGNGEAPMPMAKKRLRRRQYY

SEQ ID NO: 231 - DNA, 1422 bp, Lithospermum erythrorhizon
atggggtatgctatgagtagatttgaaactgatgtatctgtaatctttagttcaagttctgattctgagacttctcatgattctcttatcaataagccagtgaaaaatttggatcatgaaattgctcagcttactaggcttagatcagcaccccacgagaatctaagtagagacctactagttaagagggtattgccgctttcgacaatgaaaatgctggctggcagagaagctaatgtttcaggaagagggaggttttcatctgcagattgttgtcatgtagtcagtcgacatttgcctgttaacgatccttgtgttgtcgatcaaatgacatctagagtttatttgtcacagttttcgactgatggttctcttttcattgctggctttcagggatgccacatcagaatatacaatgtagataaagggtggaaagttcaaaacgacattatagcaaaatgtgtgagatggacaattactgatgcatctctttctccagatcaaaagttccttgcctatgctagcttgacaccaattgcacatattgtaaaatttggttctgctgctacggaatctcatgcaaatgttacggatatacatgatggattggatttttcatctaacgatgatgggggatactcttttggggtattttccatcaagttttcaaccgatggacgggaaattgtagctggtaccagtgatgaatcaatttgtgtttatgatctagaagcagatagactttcccttagaatttcagcccacgagtcagatgttaactctgtatgctttgctgatgaaagcggccatcttatttattctggaagtgatgacaatctctgcaaggtttgggacagacgttgcttcaatgccaaaggaaaaccagcaggcatcttgatgggacacctcgaaggaattacatttattgatagccgaggagatgggcgatattttatttcaaatggtaaagatcagacaatcaaactctgggatatccgcaaaatgtcctcgaatgctggcggcacaattcaaagcagaaatagtgaatgggactacagatggatggaatatccacaagaggcaagagatttgaagcatccatctgatctatcgggtgctacttacaaaggccactccgtcttgtgtactcttattcgctgctacttctccccagactatagtactggccagaaatacatctacactggatctcatgatgcaaatgtttatatctacgacttggtaactggagatcaagtttctacacttcagtaccataaggcaactgtaagggattgtagttggcacccaaactatcctatgcttgttagctcatcgtttgacggagaaattgtcaaatgggaatatcgtggaaacgatgaagctcccgtccaaggaaacaatcagcggcttcaaagatga

SEQ ID NO: 232 - protein, 473 aa, Lithospermum erythrorhizon
MGYAMSRFETDVSVIFSSSSDSETSHDSLINKPVKNLDHEIAQLTRLRSAPHENLSRDLLVKRVLPLSTMKMLAGREANVSGRGRFSSADCCHVVSRHLPVNDPCVVDQMTSRVYLSQFSTDGSLFIAGFQGCHIRIYNVDKGWKVQNDIIAKCVRWTITDASLSPDQKFLAYASLTPIAHIVKFGSAATESHANVTDIHDGLDFSSNDDGGYSFGVFSIKFSTDGREIVAGTSDESICVYDLEADRLSLRISAHESDVNSVCFADESGHLIYSGSDDNLCKVWDRRCFNAKGKPAGILMGHLEGITFIDSRGDGRYFISNGKDQTIKLWDIRKMSSNAGGTIQSRNSEWDYRWMEYPQEARDLKHPSDLSGATYKGHSVLCTLIRCYFSPDYSTGQKYIYTGSHDANVYIYDLVTGDQVSTLQYHKATVRDCSWHPNYPMLVSSSFDGEIVKWEYRGNDEAPVQGNNQRLQR

SEQ ID NO: 233 - DNA, 1464 bp, Lycopersicon esculentum
atgtattttgatttcttacacccagagtccattgaagacatggggtattctctaagtaagttagaagtagacaccggactctttgatggttcaagttccaatcatggggttgctagcagtgttcatcatgaaagaccaacaaattatttggaccatgaaatttctcaacttactaagcttagatcaggaccccatgaaaatctcagtagaatcctaccagggaaaaaggaagttcctgtatccgcattcaagatgttagctgctcgagaagccaatatttccggtagaggaaggttttcgaaggcagattgttgtcatgttctaagtaaatatttgccagttagtggtccttggattgtggaccagatggaaaccagagcttatgtatcacaattttcagcagatggttccctttttgttgctgcctttcagggaagtcatattagaatatacaatgtggaaagagggtggaaagttcacaagaatattcatgcaaaaagtttgagatggacagttactgatacatctctttctccggatcaacgtcatttggtctatgctactatgtcacccatcgtacatattgtagatgtaggatctgctgcctctgaatctgtagccaacatcacagaaattcatgatggtttgcttttgtctactgacaatgatgattttggaattttctctgtgaaattttctactgaaggtcgggaagttgttgctggaagtagtgatgatgcgatctatgtttatgatcttgaagcaaacaaactctctcttcgaatatccgcacacaattctgatgtcaattctgtatgttttgctgacgaaagtggccatctcatttattctggaagtgatgacaatctgtgtaaggtctgggatagacgttgttttagggccaaagaaaagccagccggagtcttgatgggacacctagaaggcgttacgttccttgatagtcggggggatggtcgttatttcatttctaacagtaaagatcagtccatcaagctctgggatatccgcaaaatgtcttctcatgctgctcgcaatatctggttcaggaattatgagtgggactatagatggatggactaccctgctcaagctagagacgtgaagcacccttatgatcagtcaatatccacttataagggtcattctgtcttgcgtactctaattcgctgctacttctcaccagaatatagcactgggcagagatacatttacacaggatcccatgatgcctgcgtatacatctatgatttggtaagtggagagcaagtcgcgaaattgcagcaccaccggtcgaccattagagattgtagctggcaccctacttatccaatgcttgttagctcttcttgggatggagatgttgtcaaatgggaattccctggaaatggtgaagcaccactccctccaaaaaggaagcagatcagaagaaggcatttcttttaa

SEQ ID NO: 234 - protein, 487 aa, Lycopersicon esculentum
MYFDFLHPESIEDMGYSLSKLEVDTGLFDGSSSNHGVASSVHHERPTNYLDHEISQLTKLRSGPHENLSRILPGKKEVPVSAFKMLAAREANISGRGRFSKADCCHVLSKYLPVSGPWIVDQMETRAYVSQFSADGSLFVAAFQGSHIRIYNVERGWKVHKNIHAKSLRWTVTDTSLSPDQRHLVYATMSPIVHIVDVGSAASESVANITEIHDGLLLSTDNDDFGIFSVKFSTEGREVVAGSSDDAIYVYDLEANKLSLRISAHNSDVNSVCFADESGHLIYSGSDDNLCKVWDRRCFRAKEKPAGVLMGHLEGVTFLDSRGDGRYFISNSKDQSIKLWDIRKMSSHAARNIWFRNYEWDYRWMDYPAQARDVKHPYDQSISTYKGHSVLRTLIRCYFSPEYSTGQRYIYTGSHDACVYIYDLVSGEQVAKLQHHRSTIRDCSWHPTYPMLVSSSWDGDVVKWEFPGNGEAPLPPKRKQIRRRHFF

SEQ ID NO: 235 - DNA, 1488 bp, Medicago truncatula
atgtacgctatatccggtgcactttacgttgaccaaatgggctatgctatgagtagattagacgtggactctagtgatactgaagatggaaatgcaatccttgaagattctagtactggaaaagctaaaaaggcatttgaaaatttagacaatgaaattgctcaaataaccaagttgaaatcaacacctcatcaactgctagtacatgatggatctggaaggaaagagttgcctgtttccccggtgaagatgctggcaggccgcgaatctaattgttcaggacggggaaggttttcttccgctgatcgctgtcatcttttgagcaggtatttacctgtaaatggtccttggcctatcgaccaaatgcctagtcgagcatacgtgtctcagttttcagctgatggttctctttttgttgctgggttccagggaaaccacataaaaatatacaatgtggagaaaggttggaaagttcaaaaaaacattctaaccaagagtttgagatggacaatcactgatacttctctttcccctgatcaaagtcatctagtttatgccagcatgtcacccattgtacacattgtgaatgttggatcttctgagacagagtcactagcaaatgtgacggagatccacgatgggttggatttttcatcaaacgacgatggaggatactcttttggaattttctctttgaaattttcaacagatgggaaggaattagttgcaggaactagtggcgattctatatatgtatacgatcttgaaacaaataaggtttcacttcgaattttagcacacacggctgatgtaaacactgtatgttttgctgatgaaactggccatcttatttactctggaagtgatgatagtttctgcaaggtctgggatcggcgttgcttaaatgctaaagacaagccagcaggggttttgatgggacaccttgagggcattacgtttattgattcccgtggagatggacgctatttcatttcaaacggtaaagatcagaccatcaaactttgggacatacgtaaaatgtcatccaatgttaccagtaaccgtgtccgtggatataggagttttgaatgggattacaggtggatggattacccgccacaagcaaaagacttgaatcatccttgtgatcagtcagtggctacatatagaggccattcagtcttacgcactcttgtccgctgctttttttctccagcttttagcactggccagaagtacatctatactggatcacacaacgcatgtgtttatgtatatgatttggtgagtggagcacaagttgcaacattgaagcaccataaatcacctgtaagagattgtagttggcatcccttccaccctatgcttgttagctcttcttgggatggagatgttgtaaaatggcaatctgctggaagctctgatatggcagcctcgtcggttaagaagagggtaaacaaaagacatttttatgaagattacctatga

SEQ ID NO: 236 - protein, 495 aa, Medicago truncatula
MYAISGALYVDQMGYAMSRLDVDSSDTEDGNAILEDSSTGKAKKAFENLDNEIAQITKLKSTPHQLLVHDGSGRKELPVSPVKMLAGRESNCSGRGRFSSADRCHLLSRYLPVNGPWPIDQMPSRAYVSQFSADGSLFVAGFQGNHIKIYNVEKGWKVQKNILTKSLRWTITDTSLSPDQSHLVYASMSPIVHIVNVGSSETESLANVTEIHDGLDFSSNDDGGYSFGIFSLKFSTDGKELVAGTSGDSIYVYDLETNKVSLRILAHTADVNTVCFADETGHLIYSGSDDSFCKVWDRRCLNAKDKPAGVLMGHLEGITFIDSRGDGRYFISNGKDQTIKLWDIRKMSSNVTSNRVRGYRSFEWDYRWMDYPPQAKDLNHPCDQSVATYRGHSVLRTLVRCFFSPAFSTGQKYIYTGSHNACVYVYDLVSGAQVATLKHHKSPVRDCSWHPFHPMLVSSSWDGDVVKWQSAGSSDMAASSVKKRVNKRHFYEDYL

SEQ ID NO: 237 - DNA, 1392 bp, Oryza sativa
atgggttatggcatgagtaggatggaggaggaatacagcgagcatgaagatcagaataatggtggatctaattcacaagtgaataatgagttcttaaacacacataatgatattttccatatgactcaaataagatcaggacctagtgaaagtcttcgcaagtctattggtacaagcaaagatgtgatatcgacaaccaggttattgtctggaagggaaattaattcttcaggaaatgggaagttctcttcagttgatcgtgcgtttcttcttggtcgttatcttccagttgatggccctgaaatagtggacaggatggattcccgagcttatgtttcacagttttctgctgatggatctctttttgttgctggttttcagggaagccacataagaatatatgatgttgataaaggttggaaagtacatagggacattcatgctagaagtttgagatggaccattagtgacgcatcactttcccctgatcaacagtttcttgtctactccagtctagcaccgattatccatatcgtcaatgttgggactgctgcaaaacaatcatatgctaatatcactgacatccacgatggactagatttttcacagcatgaagatgttcgatatacatttggaatattttctgttaaattctcttctgatggccgagagcttgttgctggcagtaacgatgattcaatatatgtttatgaccttgtggcaaacaaactaacgttgcgtttgcctgctcatcattctgatgtcaacacagtagcatttgctgacgaaactggccatctcatatattctggaagtgatgataatttatgcaaggtctgggataggcgatgtttatccacagaagaacctgctggagttttgactgggcatttgcatggcattactcatattgatagccgtggagatggtcggtgtttcatatcaaatggaaaagaccaagctatcaaaatgtgggacatcaggaaaatgacatccaatgctgatagttatgaagacagaacctcaaattgggactatagatattcaagatatccacaacagtataagcaactaaagcatccccatgatcagtcaatagctacatactggggccattcagttcttcgtacattgatccgttgctatttttctcctgcatatagcacaggacagaagtacatatatacaggatcctatgattctagtgtttgtatctacgatgtggtgagcggatcacaagttgcaaaactcaaaggatatcatcagctggcaattcgagactgcagttggcatcccttcgaccctatgcttgtcagctcatcctgggacggccgggttgccaagtggtccaggtcttcctgtcagcaagaagagactactgatctcgattga

SEQ ID NO: 238 - protein, 463 aa, Oryza sativa
MGYGMSRMEEEYSEHEDQNNGGSNSQVNNEFLNTHNDIFHMTQIRSGPSESLRKSIGTSKDVISTTRLLSGREINSSGNGKFSSVDRAFLLGRYLPVDGPEIVDRMDSRAYVSQFSADGSLFVAGFQGSHIRIYDVDKGWKVHRDIHARSLRWTISDASLSPDQQFLVYSSLAPIIHIVNVGTAAKQSYANITDIHDGLDFSQHEDVRYTFGIFSVKFSSDGRELVAGSNDDSIYVYDLVANKLTLRLPAHHSDVNTVAFADETGHLIYSGSDDNLCKVWDRRCLSTEEPAGVLTGHLHGITHIDSRGDGRCFISNGKDQAIKMWDIRKMTSNADSYEDRTSNWDYRYSRYPQQYKQLKHPHDQSIATYWGHSVLRTLIRCYFSPAYSTGQKYIYTGSYDSSVCIYDVVSGSQVAKLKGYHQLAIRDCSWHPFDPMLVSSSWDGRVAKWSRSSCQQEETTDLD

SEQ ID NO: 239 - DNA, 1476 bp, Pinus radiata
atgaatacggcaatgcattttggtgctggttggcgatcgattgctgagatggggtatacgatgagcagactagagattgagcctgagtcgtgtgaggacgagaagagcttggatggggttggtaacagccagggaccgaatgagttgccgagatgcttggatcatgagttggcgcatttgacgaatctgaagtcgaggccccatgaacatttgatccgagatttccctgggaggcgggctctgcctgtttccaccgttaagatgctggcgggtcgagagtgtaattattcacgaagagggaggttctcctccgctgattgctgtcacatgctgagcagatatgtgcctgttaatggtccttcgcccctggatcagatgaatagtcgagcttatgtttcgcaattttcagctgatggttctctatttgttgctggctttcagggtagccacattagaatttataatgttgataaaggatggaaatgtcagaagaacattcttaccaagagtttacggtggacgatcactgatacatctctttctcctgaccaacgttaccttgtgtatgccagtatgtcacccatcgtccatattgttgacatcggctccgctgctatggattctcttgcaaacatcacggagatccatgagggtttggatttttccgctgacagtggaccatattcttttggaatcttctctgttaaattttctaccgatggacgagaagtcgtcgctggaagcagcgacgattctatatatgtctatgatcttgtggcaaataagctttccctcagaattccagcacatgagtctgatgtgaacacagtatgctttgctgatgaaagtggtcatataatttattctgggagtgatgatacatactgcaaggtgtgggatagacgttgcctgagtgccagaaataaacctgcaggagttctaatgggacaccttgaaggcattacgttcattgatagccgtggtgatggtcgttatttcatatcaaatggcaaagatcagacgatcaaactttgggatatccggaaaatgggctctgatatctgtcgtcgaggctttaggaatttcgaatgggattacagatggatggactacccaccccgggctagggattcgaaacacccttttgatctgtcagtggcaacatataaaggccattcggtgttgcgtactcttattcggtgctacttctccccagtacatagcactggtcaaaagtatatctacactggatcccatgattcctgtgtttatatctatgatgtggtgactggagctcaagttgcggccctcaagcaccataaatcgccggtcagagactgcagttggcacccggagtacccgatgattgtgagctcttcttgggatggggatattgtgaaatgggaattctttgggaacggagaaactgagatcccggcgatgaagaagaggatccggaggcggcatttgtattaa

SEQ ID NO: 240 - protein, 491 aa, Pinus radiata
MNTAMHFGAGWRSIAEMGYTMSRLEIEPESCEDEKSLDGVGNSQGPNELPRCLDHELAHLTNLKSRPHEHLIRDFPGRRALPVSTVKMLAGRECNYSRRGRFSSADCCHMLSRYVPVNGPSPLDQMNSRAYVSQFSADGSLFVAGFQGSHIRIYNVDKGWKCQKNILTKSLRWTITDTSLSPDQRYLVYASMSPIVHIVDIGSAAMDSLANITEIHEGLDFSADSGPYSFGIFSVKFSTDGREVVAGSSDDSIYVYDLVANKLSLRIPAHESDVNTVCFADESGHIIYSGSDDTYCKVWDRRCLSARNKPAGVLMGHLEGITFIDSRGDGRYFISNGKDQTIKLWDIRKMGSDICRRGFRNFEWDYRWMDYPPRARDSKHPFDLSVATYKGHSVLRTLIRCYFSPVHSTGQKYIYTGSHDSCVYIYDVVTGAQVAALKHHKSPVRDCSWHPEYPMIVSSSWDGDIVKWEFFGNGETEIPAMKKRIRRRHLY

SEQ ID NO: 241 - DNA, 1467 bp, Populus tremuloides
atgtatttttttgctagaagaacttcggtagacgaaatgggttacgctatgagcagactggagactgaatctgaactctgtgatggtggcaagaccattcctgaggctggtagcagcaagagagccagcaattggttgaataacttagaccatgaaattgctcaggttacgaagttgaaatctagtccgcataaacagctggccgaacttgttcccggcatgcataagtcatctgtttccactgttaagatgttggttggtcgagaagctaattattcagcaaggggaagattctctgcagctgatcgttgtcacatgcttagcagatatttgcctgtcaatggaccttggcttgttgaccagatgagtacccgagcctatgtctcgcagttttcagctgatggctctctatttgttgctgggtttcagggaagctatattagaatatacaatgtggagaaggggtggaaagttcagaagaacattcttgccaaaagtttgcgttggactgttaccgatacatctctttccccagatcagcgccatctcgtttatgcaagcatgtcacctattgtccatattgttgatgctgggtctgccgaaacagagtcgcttgcaaacgttacggagtttcatgacggattggacttttcttctggtgatgggggctattcttttggaatcttctctgtgaaattttccactgatgggcgagaacttgttgcaggaagtaatgatgactccatatatgtctacgaccttgaacaaaataagctctccctcagaattttggcacacacgtctgatgttaacactgtatgttttgctgatgaaagtggccaccttatcttttctgggagtgatgataatctttgcaaggtgtgggatagacgctgctttattgcaaaagggaagccagctggagtcctaacaggacacttagaaggcataacatttattgacagccatggagatggtcggtattttatctcaaatggtaaagatcagactatcaaactttgggatattcggaaaatggcccctaatgctactagctattcagggcttaggaattatgaatgggactacaggtggatggactacccatatgaggcaagagatttgaaacacccctgcgatcaatcagtagccacatataaaggtcattcggttctgcgcactcttatccgctgctacttttctcctgtatatagtactggccagaagtacatctacactggatctcatgattcttgtgtttatatttatgacttggtgactggagaactagtttcattactacaacatcataaatcacctgtaagagattgtagttggcacccatattatcccatgctcgtcagctcttcttgggacggagatgtcgtaaaatgggagtttcctggcaatggagaagctccagtcccttcaaccaagaagagaattcgaaggagacaatttgattga

SEQ ID NO: 242 - protein, 488 aa, Populus tremuloides
MYFFARRTSVDEMGYAMSRLETESELCDGGKTIPEAGSSKRASNWLNNLDHEIAQVTKLKSSPHKQLAELVPGMHKSSVSTVKMLVGREANYSARGRFSAADRCHMLSRYLPVNGPWLVDQMSTRAYVSQFSADGSLFVAGFQGSYIRIYNVEKGWKVQKNILAKSLRWTVTDTSLSPDQRHLVYASMSPIVHIVDAGSAETESLANVTEFHDGLDFSSGDGGYSFGIFSVKFSTDGRELVAGSNDDSIYVYDLEQNKLSLRILAHTSDVNTVCFADESGHLIFSGSDDNLCKVWDRRCFIAKGKPAGVLTGHLEGITFIDSHGDGRYFISNGKDQTIKLWDIRKMAPNATSYSGLRNYEWDYRWMDYPYEARDLKHPCDQSVATYKGHSVLRTLIRCYFSPVYSTGQKYIYTGSHDSCVYIYDLVTGELVSLLQHHKSPVRDCSWHPYYPMLVSSSWDGDVVKWEFPGNGEAPVPSTKKRIRRRQFD

SEQ ID NO: 243 - DNA, 1428 bp, Prunus armeniaca
atgagttacagaacaaggtttggaaaagataatagcgcttgtgatagtggaaatgctgttgaaggttctggttcaagtaaaggacccaatgaagtatcaaatgattttgatcatgaaattgctcaactcactaagcatagatcaagaccccatcagcttttgagccaggacatgcctggaaagtcgaggttactggtttcaacaatgaaaatgttggttggtcgtgaaagtaatcattcaggacgtgggagattctcgtctgctgacggttgccatgttttgagccggtatctgcccatcaatggtccttggggggtggaccagtcaacaagtcctgcttatgtttctcaattttcaaatgatggtttgttttttgttgctggatttcagggcggccatattagaatatataatgttgataagggatggaaagttcagaaggacatcctaaccaaaagcttgagatggacaattactgatacatctctatctccagatcaacgttatcttgtttatgctagcatgacacccattgtcaatattgtcaatgttggatcttctatgacagagtcacttgcaaatgttacggaaattcatgaaggtctggatttttctgttggtggtgatgaggacgaatttggaattttctcagttagattttcaactgatgggcgagagcttgtagctgcaagtagagatgcttcaatatatgtttatgatctccaagcaaataaagttaacctccgaataccagcacactcgtctgatgtaaacactgtatgctttgcggatgagactggacatctcatatattctggcagtgacgataatctctgtaaggtttgggatagacgctgctttaatcacaaaggacagccagctggggtcctgatgggacatcttgaaggtgttacatttattgatagtaggggagatgggcgttacttcatatcaaatgggaaggaccagactacccaactctgggatataagaaagatgtcctctagagccatgtacagcccaaggcttagagatcatgactgggattacagatggatggagtacccagctcatgcaaaaactttgaaacatccaaatgatcagtcactggctacatatagaggtcatggagtcctgcgtactttaattcgctgttacctttctccagcatatagtactggacaaaagtacatctacactggatctagtgatcattgtgtctatatatatgatctggtgaccggtgctcaagttgcgagactcaaccatcacgaaggacctgtaagagactgtagttggcatcctctctatccgatgttggtcagctcttcttgggatgggacgattgccagatgggaatttcctggggatgaccaagtacccaccctggagaggccgagagcgcgccggaaggagaggctactataa

SEQ ID NO: 244 - protein, 475 aa, Prunus armeniaca
MSYRTRFGKDNSACDSGNAVEGSGSSKGPNEVSNDFDHEIAQLTKHRSRPHQLLSQDMPGKSRLLVSTMKMLVGRESNHSGRGRFSSADGCHVLSRYLPINGPWGVDQSTSPAYVSQFSNDGLFFVAGFQGGHIRIYNVDKGWKVQKDILTKSLRWTITDTSLSPDQRYLVYASMTPIVNIVNVGSSMTESLANVTEIHEGLDFSVGGDEDEFGIFSVRFSTDGRELVAASRDASIYVYDLQANKVNLRIPAHSSDVNTVCFADETGHLIYSGSDDNLCKVWDRRCFNHKGQPAGVLMGHLEGVTFIDSRGDGRYFISNGKDQTTQLWDIRKMSSRAMYSPRLRDHDWDYRWMEYPAHAKTLKHPNDQSLATYRGHGVLRTLIRCYLSPAYSTGQKYIYTGSSDHCVYIYDLVTGAQVARLNHHEGPVRDCSWHPLYPMLVSSSWDGTIARWEFPGDDQVPTLERPRARRKERLL

SEQ ID NO: 245 - DNA, 1437 bp, Saccharum officinarum
atgcgcggagtgcggcggagcgcgcgcggggaatcgtcccggaaggcggcggcggaccgggaccgggaggtggagcggttcacgctgtgcgccaagatgtcccacctcaccaggaccacgtcggagccgtgccgcagggctcgcggcgccgctccggcgctccggaagaggcccttctcggcgttcgagctggtgtcggcgagggaggccggccgcgcgggcggcgccgggttctccgcggccgaccgagcctacgtcggcaggcagcacatccccaccaaggggccctggggcgtcgacgacgtggacagcgaggcctacgtctcgcagttctccgctgatggctccttgctcatcgctgggtttcggggaagccgcatcagagtctacgacgccgagaaagggtggaagattcataaggatataagctgccaaatggtgcactggacggtttcagacattgctctctcacctgaccaacgattccttgcctatgcaagtttgtcgcctactgttcacattgtgaacgtgcagagtgctggaaaggaatcacatgctaatattactgaaattcatgagggactggatttaactggtggtgatgaggatgaggactttggaatattttctgttaaattctcaaaagatggtaaagaaattgttgttgggaacaatgaaagatcaatatatgtttatgaccttgcaacaaataaagtgtcagcccgcatccgtgctcataaagctgatgtcaatgctgttaccttcgctgatgaaagtggaaatgtgttgtactctggaagtgatgatagtttctgtaaggtgtgggacagacgttgcctttcaggggaaaagtcagcaggtactttaacaggtcatttagatggagttacatttatcgatagccgtggtgatgggcgttatttcatctccaattgcaaggatcagagaatcaaactttgggacatcaggaaaatgtcttccgtcgtgagagctcgcccagtgagtctagtggactgggactataggtgggagctatttccatcagaagcccacaattttaagcatccagatgatcagtctgtggccacatacagaggccattcagttctgcgaacacttatccgttgctatttctcccctgtgcacagcacgggtcagaggtacatatacacaggatccagtgacaagtctgtacatatttatgatgtggtaagcgggaagactgtcaagaggctttcttggcatggctcgatcatcagagactgcacctggcatccatactacccaacgctcgtcagctcctcctgggacggctatgttgcccgctgggaggcatcaggcgacgacgacgacccttcagtgctcgtccacgacgagaagagggcaacccgttactttcggagatacgccaatcccttcacagatcccttcatgtga

SEQ ID NO: 246 - protein, 478 aa, Saccharum officinarum
MRGVRRSARGESSRKAAADRDREVERFTLCAKMSHLTRTTSEPCRRARGAAPALRKRPFSAFELVSAREAGRAGGAGFSAADRAYVGRQHIPTKGPWGVDDVDSEAYVSQFSADGSLLIAGFRGSRIRVYDAEKGWKIHKDISCQMVHWTVSDIALSPDQRFLAYASLSPTVHIVNVQSAGKESHANITEIHEGLDLTGGDEDEDFGIFSVKFSKDGKEIVVGNNERSIYVYDLATNKVSARIRAHKADVNAVTFADESGNVLYSGSDDSFCKVWDRRCLSGEKSAGTLTGHLDGVTFIDSRGDGRYFISNCKDQRIKLWDIRKMSSVVRARPVSLVDWDYRWELFPSEAHNFKHPDDQSVATYRGHSVLRTLIRCYFSPVHSTGQRYIYTGSSDKSVHIYDVVSGKTVKRLSWHGSIIRDCTWHPYYPTLVSSSWDGYVARWEASGDDDDPSVLVHDEKRATRYFRRYANPFTDPFM

SEQ ID NO: 247 - DNA, 1380 bp, Triticum aestivum
atgggttatggcatgagtaggctacatgagggatacagtgagcctgaagggctgaatagtgatggatctagttcagtcgaagtgaataatgatttctcaaagttacacaatgatattttccatatgactcgactaagatcaggacctagtgaaagcatccgcaagtccatggatagagtctcagtgactaggttgttacgtggaagggaagttaattcttcaggaaatggaaagttctctccggttgatcgtgcattcgttcttggtcattatcttccagtggatggtcctgaaacggtggatacaatggattcacgagcttatgtttcacagttttctgccgatggttctctttttgttgctggttttcagggaagccacataagaatatatgatgtcgataaaggttgggaaatacacaaggacattcatgctagaagtttgagatggacaattagtgatgcagcgttatcacctgatcaaaggttccttgtctactctagtctggcacccattatccatattgtcaatgttggcactgcttcaagagaatcatatgctaatgtcactgacatccatgatggattagatttttcagagcatgaagatgttagatattcatttggactcttttctgttaaattttccactgatgggcgggagcttgttgctggcagtaatgatgattcaatatatgtctatgaccttcagaccaacaaagtgacattgcgtttgcctgcccatacatctgatgtcaacacagtagcatttgctgatgaatctggtaacctactttattctggaagcgatgataacttgtgcaaggtctgggacagacgttgtttgtccacaggggaagcggctggggttttgactggacatctgcatggcattactcatattgacagccgtggagatggtcgatgtttcatatcaaatggaaaagatcaagctattaagatgtgggacatccggaaaatgacatccaatgctgatggttccgaaaacagagtccctgcctgggactacagatattcaagatatccacaacagtacaagcaacaaaagcatccacatgaccagtcagtagctacataccggggccattcagttctccgtacattgattcgttgctatttttctcccacatatagcacaggacagaagtacatatatacaggatcttatgatgctagtgtctgcatctatgatgtggtaagtgggtcgcaagttgccaaactgcaaggacatcatcatttggcagttcgagactgcagctggcatccgtccgatccaatgcttgtcagttcatcatgggacggccaggttgccagatggtccaggactcgctccaagcaagatacttgtgaactcgattaa

SEQ ID NO: 248 - protein, 459 aa, Triticum aestivum
MGYGMSRLHEGYSEPEGLNSDGSSSVEVNNDFSKLHNDIFHMTRLRSGPSESIRKSMDRVSVTRLLRGREVNSSGNGKFSPVDRAFVLGHYLPVDGPETVDTMDSRAYVSQFSADGSLFVAGFQGSHIRIYDVDKGWEIHKDIHARSLRWTISDAALSPDQRFLVYSSLAPIIHIVNVGTASRESYANVTDIHDGLDFSEHEDVRYSFGLFSVKFSTDGRELVAGSNDDSIYVYDLQTNKVTLRLPAHTSDVNTVAFADESGNLLYSGSDDNLCKVWDRRCLSTGEAAGVLTGHLHGITHIDSRGDGRCFISNGKDQAIKMWDIRKMTSNADGSENRVPAWDYRYSRYPQQYKQQKHPHDQSVATYRGHSVLRTLIRCYFSPTYSTGQKYIYTGSYDASVCIYDVVSGSQVAKLQGHHHLAVRDCSWHPSDPMLVSSSWDGQVARWSRTRSKQDTCELD

SEQ ID NO: 249 - DNA, 1416 bp, Triticum aestivum
atggcggcggcagggagactgcggggacggcggcggacaaaggaggtggagcgcgagcccgagccgttcaccatcgaggaggaggtgtcccacctcacccgggtccggtcggagccgtgccccggcacccgcgccgccatccatggcgccaagcggaagagggacgtctcggctttcgagatgctgtcgtcgagggagtccggcctctcgggaggcggcgggttctgttcggccgaccgcgcctacgccgccgggaagcacctcccgtcggaaggaccctggtgcgtggaagacatggatagcgaggcctatgtctcgcagttctccagcgatggctcgatgctcgttgccgggtttcggggaagccgcatcagagtttacgatgtcgatagagggtggaaggttcataagaacataagctgcagaagtatgaggtggacggtttcagatattgcgctctcccctgaccagcgatatcttgcctattccagtttgtcgcctattgttcacattgttaatgtgcagaatgctggaagggaatcggatgctaatgttactgaaattcacgatggtttggaattctgtgatgacgatgaatactctttcgggatattctctgtgaaattttcgaaagatggtagagaagtagttgttgggaacaatgattgttcaatatatgtctatgatcttggagcaaataaagtgtcagaccgtatccgtgctcatacgtctgatgtcaacacggtcacctttgctgatgaaagtggcaatttattgtactctggaagtgatgataatctctgtaaggtctgggataggcgttgccttgtaagagagaaaccagcaggtgttttgacaggtcacttagatgggattacatgtattgatagccgtggtgatgggcgttatctaatctccaactgcaaggatcagactatcaaactttgggacatcagaaagatgtccgccaccgtaaaaggacgacaaccaagattgtatgactgggactacagatggatgtcgttcccgtcacacgctagatattataagcatccaaatgatctatctctggcaacatacaggggtcattcagttctgcggacacttatccgctgctacttctctccaatgcacagcacgggccagaggtacatatacactggatcaagtgacgattcagtgcatatttacgatgtggtaacaggggcgaccgtcaagaagctctcgtggcacggttcgatcatcagagactgcacctggcatccttaccgtccaacgctcgtaagctcttcctgggacggctatctggcccggtgggaggcatcaggcaacaatgaggacccctcggtgctcacgtgcgacgagcagaggactagcccttacgaccagacatacgggctctcttttgccctgtag

SEQ ID NO: 250 - protein, 471 aa, Triticum aestivum
MAAAGRLRGRRRTKEVEREPEPFTIEEEVSHLTRVRSEPCPGTRAAIHGAKRKRDVSAFEMLSSRESGLSGGGGFCSADRAYAAGKHLPSEGPWCVEDMDSEAYVSQFSSDGSMLVAGFRGSRIRVYDVDRGWKVHKNISCRSMRWTVSDIALSPDQRYLAYSSLSPIVHIVNVQNAGRESDANVTEIHDGLEFCDDDEYSFGIFSVKFSKDGREVVVGNNDCSIYVYDLGANKVSDRIRAHTSDVNTVTFADESGNLLYSGSDDNLCKVWDRRCLVREKPAGVLTGHLDGITCIDSRGDGRYLISNCKDQTIKLWDIRKMSATVKGRQPRLYDWDYRWMSFPSHARYYKHPNDLSLATYRGHSVLRTLIRCYFSPMHSTGQRYIYTGSSDDSVHIYDVVTGATVKKLSWHGSIIRDCTWHPYRPTLVSSSWDGYLARWEASGNNEDPSVLTCDEQRTSPYDQTYGLSFAL

SEQ ID NO: 251 - DNA, 1461 bp, Vitis vinifera
atgtattttacagccagtgagggtgctgctaatgaaatggggtatgccatgagtagattggagctagattctgatttctgtgatgctggcaaggacatccatggaaatgataacactgaaagactcaacaaagaattgaatcatttagatcatgaaatttcccagctcacaaagcttagatcgggacctcacgaatgtctgagtcagattattcctggaaagcgggactcacctgtttcgacggttaagatgctggcgggtcgagaagggaattattcaggaaggggaaggttctcatcagctgattgttgtcatatgttaagtagatatttgcctgtcaatggtccttggcttgtggaccaaatgacaagtcgagcttatgtgtcgcaattttctgctgatggttccctgtttgttgcagggtttcagggaagccatattagaatatacaatgtggatagagggtggaaagtgcagaagaatattcttgcaaaaagcttgcgatggacagtcactgatacatctctctcccctgatcaacgccatcttgtttatgccagcatgtcacctattgtccatattgttaatattggatctgctgcaacagaatctcttgcaaacattacggagattcatgatggtttggatttttctgctgctgatgatgagggttattctttcggaatcttctcagtgaaattttccacagatgggcgagagcttgtagctggaagtagtgatgattcaatatatgtttatgatcttgaagcaaataagctttcccttagaatttcggcacacacgtctgatgtcaatactgtatgctttgctgatgaaagtgggcatcttatttattccgggagtgatgatagtttgtgcaaggtttgggacagacgttgcttcatatcaaaagggaagcctgcaggagtcctgatgggacacctagaaggaattacttttattgatagccgtagagatggtcgtcatctcatttcaaatagtaaagaccagtctatcaaactttgggacatccgaaaaatgtcctccaatgctacttgcactccagggttcaggaattatgaatgggattatagatggatggattatccaacccaggcaagagagttgaaacacccatgtgatcaatcactttccacttataaaggtcattcagtcctgcgtactctcatacgctgctacttctccccgtcttatagcactggtcagaaatacatctactctggatctagcgattcttgcatttatatttatgatttgctgaccggagcccaagttgcaacactggagcaccataaatcagtcgtaagagattgtaattggcaccctaattatccaatcctggttagctcttcatgggatggagacattgtcaagtgggaattccctgggaatggagagccccctttgatcaagaaacgaatccggcggaaatatttatag

SEQ ID NO: 252 - protein, 486 aa, Vitis vinifera
MYFTASEGAANEMGYAMSRLELDSDFCDAGKDIHGNDNTERLNKELNHLDHEISQLTKLRSGPHECLSQIIPGKRDSPVSTVKMLAGREGNYSGRGRFSSADCCHMLSRYLPVNGPWLVDQMTSRAYVSQFSADGSLFVAGFQGSHIRIYNVDRGWKVQKNILAKSLRWTVTDTSLSPDQRHLVYASMSPIVHIVNIGSAATESLANITEIHDGLDFSAADDEGYSFGIFSVKFSTDGRELVAGSSDDSIYVYDLEANKLSLRISAHTSDVNTVCFADESGHLIYSGSDDSLCKVWDRRCFISKGKPAGVLMGHLEGITFIDSRRDGRHLISNSKDQSIKLWDIRKMSSNATCTPGFRNYEWDYRWMDYPTQARELKHPCDQSLSTYKGHSVLRTLIRCYFSPSYSTGQKYIYSGSSDSCIYIYDLLTGAQVATLEHHKSVVRDCNWHPNYPILVSSSWDGDIVKWEFPGNGEPPLIKKRIRRKYL

SEQ ID NO: 253 - DNA, 1431 bp, Zea mays
atgcaaggaaggatgcgaggcgcgcggcggagcgcgcgcggggaatcgtcccggaaggcggcgggccgcgaggtggagccattcacgctgtgcggcgagatgtcccatctcaccagggccacgtcagagccgtgccgcagggctcgcggcgccgccttcgcccgccgggcgaggcccttctcggcgtacgagctggtgtcggcgcgggaggccggccgcgcgggcggcgccgggttctccgcggccgatcgagcctacctcggcaggcagcacatccccaccaaggggccgtggggcgtcgacgacgtggaaagcgaggcctacgtctcgcagttctccgccgatggctcgttgctcatcgcggggtttcggggaagccgcatcagagtctacgacgccgagaaagggtggaagatccacaaggatataagctgcagaagtgtgcactggacggtttcagatattgctctctcacctgaccaacgattccttgcctatgcaagtctgacacctattgttcacattgtgaatgttcagaatgctggaaaggaatcacatgctaatattactgaaattcatgagggattggatttaaccggtggtgatgaggatgaggactttggaatattttctgttaaattctccaaagatggtaaagaagttgttgttgggaacaatgaaaagtcaatatatgtttatgacctttcagcaaataaagtgtcagcccgcatccgtgctcataaagctgatgtcaatgctgttaccttcgctgatgaaactggaaacgtgttgtactctggaagtgatgatagtctctgtaaggtgtgggacaggcgttgcctttcaggggaaaagtcagcaggtattttgacaggtcatttagatggagttacatttatcgatagccgtggtgatgggcgttatttcatctctcattgcaaggatcagagaatcaaactttgggacatcaggaaaatgtcttccgtcgtgagatctcgcccagtgagtctagtggactgggactataggtggatgccatttccatcagaagctcataatcttaagcatccaggtgatcagtctgtggccacatacagaggccattcagttttgcgaacacttatccgttgctatttttcccctgtgcacagcacgggtcagaggtacatatacacgggatccagtgacaagtctgtacatatttatgacgtggtaaccggggaggctgtcaagaggctttcgtggcatggctccatcatcagagactgcacctggcatccatactacccaacgctcgtcagctcctcctgggacggcttcgttgcccggtgggaggcctcgggcgacgacgacgaccattcggtgctcgttgccgacgagatgagaggaagcccttactaccggagatacggcgatcccttggtgatgtag

SEQ ID NO: 254 - protein, 460 aa, Zea mays
MGYGMSRLDDEYYEAEGQNTGGSGSVQVNDEFATLHNDIFHMTRMRSGLTESYKSMGTNRGIISTAKLLSRREIDCSGKGMFSSGDRAFVLGRHVPMNNPELLDRMDSRAYVSQFSADGTLFVAGFQGSHIRIYDVDRGWSIHKDIHARCLRWTISDVSLSPDQRYLAYSSLAPIIHIVNVGNAARESYANVTDIHDGLDFSQHEDVQYSFGIFSVKFSSDGRELVAGSNDDSIYVYDLHANKLTLRLSAHTSDVNTVAFADETGHLIYSGSDDTLCKVWDRRCLSAGQAAGVLTGHLHGITHIDSRGDGRSFISNGKDQAIKLWDIRKMMSNADSCADGAPAWDYRYSRYPHQHKQLKHPHDQSIATYRGHTVLRTLIRCYFSPSYSTGQKYIYTGSYDSNVCIYDVVSGSQVAKLKWHQMAIRDCSWHPFEPTLVSSSWDGRVVKWTSARDEGASDVD

SEQ ID NO: 255 - DNA, 1383 bp, Zea mays
atgggttatggcatgagtaggctagacgatgaatactatgaggctgaagggcagaatactggtggatctggctcagttcaagtgaacgatgagtttgcaacactacataatgatatttttcatatgacccgaatgagatcaggacttactgaaagctacaagtccatgggtaccaacagaggcataatatcaactgccaagttattatctcgaagggaaattgattgttctggaaaggggatgttctcttctggtgaccgtgcatttgttctaggtcgtcatgttccgatgaacaatcctgaattattggataggatggattctcgtgcttacgtttcacagttttctgctgatggtactctttttgttgctggttttcagggaagtcacataagaatatacgatgttgatagaggctggagcatacacaaagacattcatgctaggtgtttaagatggacaatcagtgatgtatccttatcacctgatcagcggtatcttgcctactctagtctggcacctattatccatattgtcaatgttgggaatgcggcaagagaatcctatgctaacgtcactgacatccatgatggattggatttttcacagcatgaagatgttcaatattcatttggaatattttctgtaaaattttcctctgatggacgggaacttgttgctggcagcaatgatgactcaatatatgtctatgatcttcatgcaaacaaattgacattacgtttatctgctcatacatctgatgtcaatacagtagcatttgctgatgaaaccggccatctcatatattctggaagtgacgacactttatgcaaggtctgggacaggcggtgtttgtccgcaggacaggctgccggagttttgactggacatttgcatgggataacacatattgatagtcgtggagatggccgaagtttcatatccaatggaaaagatcaagcaatcaaactgtgggatatcaggaaaatgatgtccaatgctgatagttgtgcagatggagccccagcctgggactacagatattcaaggtatccgcatcaacataaacagttaaagcatccgcatgatcagtcaatagcgacgtaccgtggacatacagtcctccggacattgatccgttgctacttttctccttcgtatagcactgggcaaaagtacatatatacagggtcgtatgattccaatgtttgcatctatgatgtggtaagtggatcccaggttgcgaagctgaaatggcatcaaatggcgattcgggactgcagttggcacccatttgagcccacgcttgtgagctcatcctgggacggccgggtagtgaaatggaccagcgcacgtgatgaaggggcttctgatgtcgattga

SEQ ID NO: 256 - protein, 476 aa, Zea mays
MQGRMRGARRSARGESSRKAAGREVEPFTLCGEMSHLTRATSEPCRRARGAAFARRARPFSAYELVSAREAGRAGGAGFSAADRAYLGRQHIPTKGPWGVDDVESEAYVSQFSADGSLLIAGFRGSRIRVYDAEKGWKIHKDISCRSVHWTVSDIALSPDQRFLAYASLTPIVHIVNVQNAGKESHANITEIHEGLDLTGGDEDEDFGIFSVKFSKDGKEVVVGNNEKSIYVYDLSANKVSARIRAHKADVNAVTFADETGNVLYSGSDDSLCKVWDRRCLSGEKSAGILTGHLDGVTFIDSRGDGRYFISHCKDQRIKLWDIRKMSSVVRSRPVSLVDWDYRWMPFPSEAHNLKHPGDQSVATYRGHSVLRTLIRCYFSPVHSTGQRYIYTGSSDKSVHIYDVVTGEAVKRLSWHGSIIRDCTWHPYYPTLVSSSWDGFVARWEASGDDDDHSVLVADEMRGSPYYRRYGDPLVM

SEQ ID NO: 257 - DNA, 1491 bp, Citrus sinensis
  misc_feature (665)..(665): n is a, c, g, or t
  misc_feature (666)..(799): n can be a stretch of 105 to 135 nucleotides, where n would be a, c, g, or t
atgttcgtaacagcaagtggagttgactttgacgaaatgggatatgccatgagtagattcgagatagaatctgaattctatgatgctgccgatactgtcaatcaagctagtaatagtcgtagcaaattcaagaaacccttgagtgctttagaccatgaaattgcccagctcacgaagctgaaatcggaacccaaggagcattttagcaaagaagtacctgggaagcggcacttgcctgtttccactgtgaaaatgttggctggtagggaaggcaattattcaggaagagggaggttctcagctgcagattgttgtcatatgcttagtagatatttgcctgttaatgggccctggcctgtggaccagacaactagccgagcatatgtctctcagttttcggctgatggttctttatttgttgctggatttcaggctagtcaaattagaatctatgatgtggagagaggttggaaaatacagaaagacattcttgctaaaagtttgcgttggacagtcacagatacatctctttccccggatcagcgccatcttgtttatgcaagcatgtcacctatagtgcacattgttgatgttggttctgggacaatggagtctcttgcaaatgttacggagatacatgatggattggacttttctgctgcagnnnnnnnnnnnnnnnnnnnnnnnnnnnnnnnnnnnnnnnnnnnnnnnnnnnnnnnnnnnnnnnnnnnnnnnnnnnnnnnnnnnnnnnnnnnnnnnnnnnnnnnnnnnnnnnnnnnnnnnnnnnnnnnnnnnnnnnctctcagaattttggcacacacgtctgatgttaacactgtatgttttggtgatgaaagtggccatctaatctattctgggagtgatgacaatctatgcaaggtatgggatagacgctgtctaaatgtgaaagggaagccagcaggagtcctgatgggacacctagaagggatcacgttcattgatagccgtggagatggtcgttatctgatctcaaatggtaaagatcaggccatcaaactttgggatattcggaaaatgtcctctaatgcatcctgcaatttaggatttaggagttatgaatgggattacagatggatggactacccaccccaggcaagagatttgaaacacccatgtgatcaatccgttgctacgtataaaggtcattctgtcttgcgtactcttatccggtgccacttttcccctgtatacagcactggccaaaagtatatctacactggatcccatgattcttgtgtttatgtttatgacctggtgagtggtgagcaagttgctgcactcaagtaccatacttcacccgttagagactgtagttggcacccaagtcaaccaatgcttgttagctcttcttgggatggagatgttgtcaggtgggagtttccgggtaatggagaagctgctcctcctctaaacaagaagaggatccggaggagacagttttacttgtga

SEQ ID NO: 258 - protein, 495 aa, Citrus sinensis
  misc_feature (222)..(222): Xaa can be any naturally occurring amino acid
  misc_feature (223)..(266): Xaa can be a stretch of 35 to 45 amino acids, where Xaa would be any naturally occurring amino acid
MFVTASGVDFDEMGYAMSRFEIESEFYDAADTVNQASNSRSKFKKPLSALDHEIAQLTKLKSEPKEHFSKEVPGKRHLPVSTVKMLAGREGNYSGRGRFSAADCCHMLSRYLPVNGPWPVDQTTSRAYVSQFSADGSLFVAGFQASQIRIYDVERGWKIQKDILAKSLRWTVTDTSLSPDQRHLVYASMSPIVHIVDVGSGTMESLANVTEIHDGLDFSAAXXXXXXXXXXXXXXXXXXXXXXXXXXXXXXXXXXXXXXXXXXXXXLRILAHTSDVNTVCFGDESGHLIYSGSDDNLCKVWDRRCLNVKGKPAGVLMGHLEGITFIDSRGDGRYLISNGKDQAIKLWDIRKMSSNASCNLGFRSYEWDYRWMDYPPQARDLKHPCDQSVATYKGHSVLRTLIRCHFSPVYSTGQKYIYTGSHDSCVYVYDLVSGEQVAALKYHTSPVRDCSWHPSQPMLVSSSWDGDVVRWEFPGNGEAAPPLNKKRIRRRQFYL

SEQ ID NO: 259 - DNA, 1119 bp, Glycine max
atgtctagtagggcttatgtctcccagttttcagctgatggctctctttttattgctgggttccagggaagtcacataagaatatacaacgtggacagaggttggaaagttcagaagaacattctagctaaaaatttgagatggacaatcactgatacatctctttcacctgatcaacgctatctagtttatgccagtatgtcacctattgtacacattgtaaatgccggatctgctgaaacggagtccctagcaaatgttacagagatacatgatggtttggatttttcatcaaatgatgatggaggatactcctttggaattttctgtgtgaaattctcaaaagatgggaaagaattagttgcaggaagtagtggtgattctatatatgtatacgatcttgaagcaaataagctctcacttcgaattttagctcacacgtgtgatgtgaacactgtatgttttgctgatgaaactagccatcttatttactctgggagtgatgatagtttctgcaaggtctgggatcggcgttgcttgattgctaaaggcaagccagcaggggttttaatgggacaccttgagggcattacatttattgatactcgaggagatggacgctatttcatttcaaatggtaaagatcaaaccattaaactttgggacatacgcaaaatgtcatccaatgttaccagcaatcctgggtataggagttacgaatgggattacaggtggatggattatccaccccaagcaaaagacttgactcacccttgtgatcagtcagtggctacttatagaggccattcggtcttacgcactctcatccgctgctatttctccccagcgtttagcacgggccagaagtacatctatactggatcacacaacgcatgtgtttatatatatgatttggtaagtggagctcaagtcgcaacgctgaagcaccataaatcacctgtaagagattgtagctggcaccccttccacactacacttgttagctcttcttgggatggagatgttgtgaaatgggaatttgctgggagtggtgatacaccaggctcttcaactaagaagagggtatggacaagacatttttatgaacattacctatga

SEQ ID NO: 260 - protein, 372 aa, Glycine max
MSSRAYVSQFSADGSLFIAGFQGSHIRIYNVDRGWKVQKNILAKNLRWTITDTSLSPDQRYLVYASMSPIVHIVNAGSAETESLANVTEIHDGLDFSSNDDGGYSFGIFCVKFSKDGKELVAGSSGDSIYVYDLEANKLSLRILAHTCDVNTVCFADETSHLIYSGSDDSFCKVWDRRCLIAKGKPAGVLMGHLEGITFIDTRGDGRYFISNGKDQTIKLWDIRKMSSNVTSNPGYRSYEWDYRWMDYPPQAKDLTHPCDQSVATYRGHSVLRTLIRCYFSPAFSTGQKYIYTGSHNACVYIYDLVSGAQVATLKHHKSPVRDCSWHPFHTTLVSSSWDGDVVKWEFAGSGDTPGSSTKKRVWTRHFYEHYL

SEQ ID NO: 261 - DNA, 448 bp, Hordeum vulgare
atgggttatggcatgagtaggctgcatgagggatacagtgaacatgaagggcagaatagtgatggatctagttcagtcgaagtgaataatgacttctcaaaattaaataatgatattttccacatgactcgactaagatcaggacctagtgaaagcatccgcaagtccatggatagagtctcagtaactaggttgttacgtggaagggaagttaactcttcaggaaatggaaagttttctccggttgatcgtgcattcgttcttggtcattatcttccagtggatggtcctgaaacagtggacaggatggattcacgagcttatgtttcacatttttctgccgatggttctctttttgttgctggttttcagggaagccacataagaatatatgatgtcgataaaggctgggaagtacacaaggatattcatgctagaagtttgagat

SEQ ID NO: 262 - protein, 149 aa, Hordeum vulgare
MGYGMSRLHEGYSEHEGQNSDGSSSVEVNNDFSKLNNDIFHMTRLRSGPSESIRKSMDRVSVTRLLRGREVNSSGNGKFSPVDRAFVLGHYLPVDGPETVDRMDSRAYVSHFSADGSLFVAGFQGSHIRIYDVDKGWEVHKDIHARSLR

SEQ ID NO: 263 - DNA, 1029 bp, Hordeum vulgare
aactcgtgcatgccttcatgctggcaagagccatatctctacattcaagctgttgtcatcaagagaatccaatcgctccggatttggtagattctcttcagccgattgctcttatgctcttcgcaaacacctaccagtaagaggcccgtggtgtgttgatagcatggattgcgcagcatacatctcacaattctctttggatggttctctactaattgggaggcgtatcagaatctataacgctgacaaaaaatggaagatccacaaggatataacctgcaaaagtctgcggtggacagtatcagatattgctctctcacctgatcaacaatacctagcatattccagtctgtcccctactgttcacatagtaaatgttcagaatgctccgaagcagtcacatgctaatattacaatgcaggatgttcatgagggtttgaatttttctgctgctgctgatgaatcctcctttggaatattttcaataaagttttcaaaagatgggcatgaacttgttgttggaaacagcaatgagtcaatatgtatttatgatcttggagcaaacaaagtgacagagcgaattcatgctcatgtggctgatgttaatgcggtcacgttcgctgatgaatctggtggtgtcttgtactccggaagtgatgatagcctctgtaaggtgtgggataggcgttgccacaacagagcgaaaccagtaggtgttttggcaggtcatttagatggagttacatttattgatagccatggagacgggcattatttcatctccaactgcaaggatcagactattaaactatgggatatcagaaaattgtcctcggctacgaaggactgcacaccaaaagcatacgaatgggattacagatggatgacctatccatcagaagcccgatttttgaagcatccatatgatcaatcgctagccacattcagaggccattcggtgttgcgcacacttatccgttgctacttttccccaatgcacagcacaggtcagaggtatatatacacagg

SEQ ID NO: 264 - protein, 342 aa, Hordeum vulgare
TRACLHAGKSHISTFKLLSSRESNRSGFGRFSSADCSYALRKHLPVRGPWCVDSMDCAAYISQFSLDGSLLIGRRIRIYNADKKWKIHKDITCKSLRWTVSDIALSPDQQYLAYSSLSPTVHIVNVQNAPKQSHANITMQDVHEGLNFSAAADESSFGIFSIKFSKDGHELVVGNSNESICIYDLGANKVTERIHAHVADVNAVTFADESGGVLYSGSDDSLCKVWDRRCHNRAKPVGVLAGHLDGVTFIDSHGDGHYFISNCKDQTIKLWDIRKLSSATKDCTPKAYEWDYRWMTYPSEARFLKHPYDQSLATFRGHSVLRTLIRCYFSPMHSTGQRYIYT

SEQ ID NO: 265 - DNA, 1555 bp, Pinus taeda
  misc_feature (730)..(730): n is a, c, g, or t
  misc_feature (731)..(1059): n can be a stretch of 315 to 330 nucleotides, where n could be a, c, g, or t
gctcgtagacattgaaggtccggaagctttgccaagcacagagaacagaactgcaagcacaggacaaagggagagaatgggaaactcacagtttcaaaatcatcattttgacaaagatgataacagtaacagaaatgatgaagtccaaaatatggatgatgcttctgaagatcccaacaaacttcaccatgaacttgaacatataacaaagctgaggtcagcaccaaatggtatgctgtccaggatgaatggtaagagccagaatggctatgtttcaacattatctatgttggcaggcagagaagccaatatttctgggagagggaaatttagtgtagctgattgctgtcatgttgcaagtagatatttgccatcttgtggcccagatataatggatatgatggacagtagagcatatattggacaattttcagcagatggctccctttttgtcacaggatttcaggatcatcggataagaatatacaatgtggagaatggatggacaattcaaaaggatgtgcttgctagaaacttgcgttggactatcactgacacttctctttcacctgatcagcgttaccttgtgtatgctactatcactcctattgtccacattgtgaatgttggaagcagtgtcagagaatccttagcaaacgtcacagaaattcatgaagcgctggatttctctatgtacgaagaacattgctcatttggaattttctgcgtnnnnnnnnnnnnnnnnnnnnnnnnnnnnnnnnnnnnnnnnnnnnnnnnnnnnnnnnnnnnnnnnnnnnnnnnnnnnnnnnnnnnnnnnnnnnnnnnnnnnnnnnnnnnnnnnnnnnnnnnnnnnnnnnnnnnnnnnnnnnnnnnnnnnnnnnnnnnnnnnnnnnnnnnnnnnnnnnnnnnnnnnnnnnnnnnnnnnnnnnnnnnnnnnnnnnnnnnnnnnnnnnnnnnnnnnnnnnnnnnnnnnnnnnnnnnnnnnnnnnnnnnnnnnnnnnnnnnnnnnnnnnnnnnnnnnnnnnnnnnnnnnnnnnnnnnnnnnnnnnnnnnnnnnnncattactttcatcgatagtcgtggagatggacgctattttatttctaatggaaaagaccagacgacaaagatgtgggatattcgcaaaatgactgcaggaaatcctagcataaagtcaaggagttcctctggtaatgaatgggattatcgttggatggagtatccaaagaataggaagaatgctaagcatccatatgaccagtctctgatgacttacaggggacatgctgtcttgcgtactcttgtccgctgctacttctctccatccttcagcactggccagaaatacatctacacaggatcacacgatggctgtgtttatatttatgatgtggtaagtgggaacctcattaagaaactcgactatcataggtccactgtgagggactgcagctggcatccgttctatccaactcttgtaagctgttcatgggatggagttgttgccaaatgggaccattcaacagcaagaagtcgcagaagccgcagcccgtga

SEQ ID NO: 266 - protein, 470 aa, Pinus taeda
  misc_feature (197)..(197): Xaa can be any naturally occurring amino acid
  misc_feature (198)..(306): Xaa can be a stretch of 105 to 110 amino acids, where Xaa would be any naturally occurring amino acid
MGNSQFQNHHFDKDDNSNRNDEVQNMDDASEDPNKLHHELEHITKLRSAPNGMLSRMNGKSQNGYVSTLSMLAGREANISGRGKFSVADCCHVASRYLPSCGPDIMDMMDSRAYIGQFSADGSLFVTGFQDHRIRIYNVENGWTIQKDVLARNLRWTITDTSLSPDQRYLVYATITPIVHIVNVGSSVRESLANVTXXXXXXXXXXXXXXXXXXXXXXXXXXXXXXXXXXXXXXXXXXXXXXXXXXXXXXXXXXXXXXXXXXXXXXXXXXXXXXXXXXXXXXXXXXXXXXXXXXXXXXXXXXXXXXITFIDSRGDGRYFISNGKDQTTKMWDIRKMTAGNPSIKSRSSSGNEWDYRWMEYPKNRKNAKHPYDQSLMTYRGHAVLRTLVRCYFSPSFSTGQKYIYTGSHDGCVYIYDVVSGNLIKKLDYHRSTVRDCSWHPFYPTLVSCSWDGVVAKWDHSTARSRRSRSP

SEQ ID NO: 267 - DNA, 1269 bp, Saccharum officinarum
  Unsure (566)..(566)
  misc_feature (566)..(566): n is a, c, g, or t
atgggttatggcatgagtaggctagaagatgaatattatgagcctgaagggcagaatactgatggatctggctcagttcaagtgaacgatgagtttgcaaaactgcacaacgatatttttcatatgacacgaatgagatcaagacttactgaaaggtacaagtccatggataccaacagaggcataatatcaacggccaagttattatctcgaagggaaattgattgttctggaaaggggatgttctcttcttgtgaccgtgcatttgttctaggtcgctatgttccaatgaatggccctgaattattggataggatggattctcgtgcttatgtttcacagttttctgctgatggtactctttttggtgctggttttcagggaagtcacataagaatatatgatgctgatagaggctggagcatacacaaagacattcatgctaagtgtttgagatggacaatcagtgatgtattcctatcacctgatcaacggtatcttgcctactctagtctggcacctattaatcatattggcaatgtcggaaatgctggaagagaatcctngtcgacccacgcgtccggccggcagcaatgatgaatcaatatatgtctatgaccttcaagcaaacaaattgacattacgtttacctgctcatacatctgatgtcaatacagtagcatttgctgatgaaaccggccatctcatatattcaggaagtgacgacactttatgcaaggtctgggacaggcggtgtttgtccacaggacaagctgccggagttttgactggacatttgcatggggtaacacacattgatagtcgtggagatggccgaagtttcatatccaatggaaaagaccaagcaatcaaactgtgggatgtcaggaaaatgacgtccaatgctgatagttgtgcagacggagccccaacttgggactacagatattcaaggtatccgcagcagcataaacagttaaagcatccgcatgatcagtcattagcgacataccgtggacattcagtcctccggacattgatccgttgctacttttctcctgcttacagcactgggcaaaagtacatatatacagggtcgtatgattcctgcgttcacatctatgatgtggtaagtggatcgcaagttgcgaagctgaaatggcatcaaatggcgatacgtgactgcagctggcacccatttgagcccacgcttgtgagctcatcctgggacggccatgtagcgaaatggaccagtgcacgtgatcaaaa

SEQ ID NO: 268 - protein, 461 aa, Saccharum officinarum
  misc_feature (189)..(189): Xaa can be any naturally occurring amino acid
  misc_feature (190)..(228): Xaa can be a stretch of 30 to 40 amino acids, where Xaa would be any naturally occurring amino acid
MGYGMSRLEDEYYEPEGQNTDGSGSVQVNDEFAKLHNDIFHMTRMRSRLTERYKSMDTNRGIISTAKLLSRREIDCSGKGMFSSCDRAFVLGRYVPMNGPELLDRMDSRAYVSQFSADGTLFGAGFQGSHIRIYDADRGWSIHKDIHAKCLRWTISDVFLSPDQRYLAYSSLAPINHIGNVGNAGRESXXXXXXXXXXXXXXXXXXXXXXXXXXXXXXXXXXXXXXXXRPTRPAGSNDESIYVYDLQANKLTLRLPAHTSDVNTVAFADETGHLIYSGSDDTLCKVWDRRCLSTGQAAGVLTGHLHGVTHIDSRGDGRSFISNGKDQAIKLWDVRKMTSNADSCADGAPTWDYRYSRYPQQHKQLKHPHDQSLATYRGHSVLRTLIRCYFSPAYSTGQKYIYTGSYDSCVHIYDVVSGSQVAKLKWHQMAIRDCSWHPFEPTLVSSSWDGHVAKWTSARDQ

SEQ ID NO: 269 - DNA, 1337 bp, Sorghum bicolor
  misc_feature (528)..(528): n is a, c, g, or t
  misc_feature (529)..(692): n can be a stretch of 135 to 165 nucleotides, where n would be a, c, g, or t
atgggttatggcatgagtaggctagaagatgaatactatgagcctgaagggcagaatactgatggatctggctcagttcaagtgaacaatgagtttgcagaactgcataacgatatttttcatatgacccgaatgagatcaagacttactgaaagctacaagtccatgggtaccaacagaggcataatatcaacggccaagttattatctcaaagggaaattgattgttctggaaagaagatgttctcttctggtgaccgtgcatttgttctaggtcgctatgttccaatgaacggccctcagttattggataggatggattctcgtgcttatgtttcgcagttttctgctgatggcactctttttgttgctggttttcagggaagtcacataagaatatatgatgctgatagaggctggagcatacacaaagacattcatgctaggtggttgagatggacaatcagtgatgtatccttatcacctgatcagcggtatcttgcctactctagtctggcacctattgtnnnnnnnnnnnnnnnnnnnnnnnnnnnnnnnnnnnnnnnnnnnnnnnnnnnnnnnnnnnnnnnnnnnnnnnnnnnnnnnnnnnnnnnnnnnnnnnnnnnnnnnnnnnnnnnnnnnnnnnnnnnnnnnnnnnnnnnnnnnnnnnnnnnnnnnnnnnnnnnnnnnnncgtttacctgctcatacatctgatgtcaatacagtagcatttgctgatgaaactggccatctcatatattctggaagtgacgacactttatgcaaggtctgggacaggcggtgtttgtccacaggacaagctgccggagttctgactggacatttgcatggggtaacacatattgatagtcgtggagatggccgaagtttcatatcgaatggaaaagaccaagcaatcaaactgtgggatgtcaggaaaatgacgtccaatgctgatagttgtgcagacggagccccaagttgggactacagatattcgaggtatccgcagcagcataaacagttaaagcatccgcatgatcagtcattagcgacataccgtggacatgcagtcctccggacattgatccgttgctacttttctcctgcttacagcactgggcaaaagtacatatatacagggtcgtatgattcctgcgtttacatctatgatgtggtaagtggatcgcaagttgcgaagctgaaatggcatcaaatggcgattcgtgactgcagttggcacccatttgagcccacgcttgtgagctcatcctgggacggccaggtagcaaaatggaccagtgcacgtgatcaacaggcttctgatatagattga

SEQ ID NO: 270 - protein, 445 aa, Sorghum bicolor
  misc_feature (177)..(177): Xaa can be any naturally occurring amino acid
  misc_feature (178)..(231): Xaa can be a stretch of 45 to 55 amino acids, where Xaa would be any naturally occurring amino acid
MGYGMSRLEDEYYEPEGQNTDGSGSVQVNNEFAELHNDIFHMTRMRSRLTESYKSMGTNRGIISTAKLLSQREIDCSGKKMFSSGDRAFVLGRYVPMNGPQLLDRMDSRAYVSQFSADGTLFVAGFQGSHIRIYDADRGWSIHKDIHARWLRWTISDVSLSPDQRYLAYSSLAPIVXXXXXXXXXXXXXXXXXXXXXXXXXXXXXXXXXXXXXXXXXXXXXXXXXXXXXXXRLPAHTSDVNTVAFADETGHLIYSGSDDTLCKVWDRRCLSTGQAAGVLTGHLHGVTHIDSRGDGRSFISNGKDQAIKLWDVRKMTSNADSCADGAPSWDYRYSRYPQQHKQLKHPHDQSLATYRGHAVLRTLIRCYFSPAYSTGQKYIYTGSYDSCVYIYDVVSGSQVAKLKWHQMAIRDCSWHPFEPTLVSSSWDGQVAKWTSARDQQASDID

SEQ ID NO: 271 - protein, 336 aa, Artificial sequence
  Conserved Domain comprised in SEQ ID NO: 02
YVSQFSTDGSLFIAGFQGSRIRIYNVEKGWKVQKDILAKSLRWTVTDTSLSPDQRNLVYASMSPIVHIVDVGSGSTESHANVTEIHDGLDFSSDEDGGYSFGIFSVKFSTDGREVVAGSSDDSIYVYDLEANRVSLRTVAHTSDVNTVCFADESGNLILSGSDDNLCKVWDRRCFIGRDKPAGVLVGHLEGVTFIDSRGDGRYFISNGKDQTIKLWDIRKMSSSAPARHEVLRNYEWDYRWMDYPTEARDLKHPLDQSVSTYKGHSVLRTLIRCYFSPAHSTGQKYIYTGSNDSSVYIYDLVSGDKVAVLKHHSSPVRDCNWHPYYPTLISSSWDG

SEQ ID NO: 272 - DNA, 2194 bp, Oryza sativa; identical to SEQ ID NO: 75

SEQ ID NO: 273 - DNA, 1245 bp, Oryza sativa
cttgttgttgatctgtgcccccaagaagaataacactctactcttacttgttggaaaaaaatagtattagcaaccacgcatatgcaaattttaatgcagtaataataagagatggatcgatcgttttccagctcttgtatatgtgactggccctgctttatgtgtgtagtgttaatttcagctttagcagtacgtgattagtgatggacaataattgtcgcagacgtatctatcaattgctcctgttgtgtgatgctttaactgttggaatcaaagttgcgttgcctttgttgttatgaggaggaatatatatgttggggcaggaaaagaatggaggagagatcgttctccatatccttatcatcggcctcgtcactgctcgcagtttaactttttggtgatgcgagcgatggtcagccatatatatactcccatgctgcatgctagtaatcaatatacgccttgtaaaagtaaacgatcgtctagtaattgcaatatcataggggtagccattgacagagatctacatagatagagggggaacaagaattgacactccacagatgctccactcattcacctttactaatttatatcttttgatgtttgatcgatcgatcgatccgtccgtcggtgtctcgacgaataaaaactgcaaatcgaactgtatgtatataatatagcgtcgtaaattaaattaaattaaatcgaactgaatactacatgtcgaagcaagaattagttcaactaaaagatttagtttttccggttgcaatatctgtgaaattaattgaagaaattaagaagaaaactggagagatatatatatggatgagacaaaatgagataagacgcatgatggtccctcggatgatgtcgtccgttccttatttccattccatggcagctgctatcgctatctagtgcgcgcggcatctccaatcccatccattctagtggtcgatctagctactactgagtattgttttttcttctttttactactgttgattattctgcaactgcagttagatgcttgctactcctacatcgatctctctcgcgcgggcgtatgcattgcattcactactgatgatccgtgggtgtagtgtgggtggctataaatagggcagggtgcggttgccattgctcctcaggccagcaactgagaagctccatacaagtaagcagcagctagttgccgacaaggccagagaaggaagaagaagctctcatcatcatcac

SEQ ID NO: 274 - DNA, 56 bp, Artificial sequence
  primer: prm09100
ggggacaagtttgtacaaaaaagcaggcttaaacaatgttttttggaccaagtgag

SEQ ID NO: 275 - DNA, 50 bp, Artificial sequence
  primer: prm09101
ggggaccactttgtacaagaaagctgggttgtgtagagagacgcatcagt

1. A method for enhancing yield-related traits in plants relative to control plants, comprising modulating expression in a plant of a nucleic acid encoding
a) a PATELLIN polypeptide and optionally selecting for plants having enhanced yield-related traits or
b) a PRP38 polypeptide or
c) an ADA2 polypeptide and optionally selecting for plants having enhanced yield-related traits or
d) a GATA-like polypeptide, wherein said GATA-like polypeptide belongs to subfamily II of GATA transcription factors and comprises a GATA domain or
e) a WDR23-like polypeptide, which WDR23-like polypeptide comprises a domain having at least 65%, 70%, 75%, 80%, 85%, 90%, 95%, 98%, 99% or more amino acid sequence identity to a Conserved Domain (CD) as represented by SEQ ID NO: 271, and optionally selecting for plants having increased yield-related traits.

2. The method of claim 1, wherein said PATELLIN polypeptide comprises at least one of the following domains:
(i) A SEC 14 domain as represented by SEQ ID NO: 71:
lpeldsvvfyrgadreghpvcynvygefqdkdlyekafgdeekrerflkwriqllergilsqldfspsgicsmvqvtdlknsppmlgkh ravtrqavallqdnypefiakkvfinvpwwylaankmmspfltqrtkskfifaspaksaetlfryiapeqvpvqfgglfk or a domain having at least 50%, 55%, 60%, 65%, 70%, 75%, 80%, 82%, 85%, 90%, 92%, 95%, 97% or more sequence identity to the domain represented by SEQ ID NO: 71 or to any SEC14 domain as present in any of the polypeptides of Table A;
(ii) A GOLD domain as represented by SEQ ID NO: 72:
sdavteltikpssketveipvtenstigwelrvlgwevsygaeftpdaeggytvivqktrkvpaneepimkgsfkvgepgkivltinnp askkkkllyrskv, or a domain having at least 50%, 55%, 60%, 65%, 70%, 75%, 80%, 82%, 85%, 90%, 92%, 95%, 97% or more sequence identity to the domain represented by SEQ ID NO: 72 or to any GOLD domain as present in any of the polypeptides of Table A.

3. The method of claim 1 wherein said modulated expression is effected by introducing and expressing in a plant
a) a nucleic acid encoding a PATELLIN polypeptide or
b) a nucleic acid encoding a PRP38 polypeptide or
c) a nucleic acid encoding a GATA-like polypeptide or
d) a nucleic acid encoding an ADA2 polypeptide or
e) a nucleic acid encoding a WDR23-like polypeptide.

4. The method of claim 1, wherein said nucleic acid encoding a PATELLIN, PRP38, ADA2, GATA-like or a WDR23-like polypeptide encodes any one of the proteins listed in Table A or is a portion of such a nucleic acid, or a nucleic acid capable of hybridising with such a nucleic acid.

5. The method of claim 1, wherein said nucleic acid sequence encodes an orthologue or paralogue of any of the proteins given in Table A.

6. The method of claim 1, wherein said enhanced yield-related traits comprise increased yield, thousand kernel weight, or seed yield relative to control plants.

7. The method of claim 1, wherein said enhanced yield-related traits are obtained under conditions of nitrogen deficiency.

8. The method of claim 1, wherein said nucleic acid encoding a polypeptide is of plant origin.

9. A plant or part thereof, including seeds, obtained by the method f claim 1, wherein said plant or part thereof comprises a recombinant nucleic acid encoding a PATELLIN, PRP38, ADA2, GATA-like or a WDR23-like polypeptide.

10. An isolated nucleic acid molecule comprising any one of the following features:
(i) a nucleic acid represented by SEQ ID NO: 9; SEQ ID NO: 11; SEQ ID NO: 13; SEQ ID NO: 15; SEQ ID NO: 17; SEQ ID NO: 19; SEQ ID NO: 21; SEQ ID NO: 23; SEQ ID NO: 25 and SEQ ID NO: 27;
(ii) a nucleic acid fragment that is complementary to any one of the SEQ ID NOs given in (i);
(iii) a nucleic acid encoding a PATELLIN polypeptide having, at least 70%, 75%, 80%, 85%, 90%, 95%, 96%, 97%, 98%, 99% or 100% sequence identity to any one of the amino acid sequences given in SEQ ID NO: 10; SEQ ID NO: 12; SEQ ID NO: 14; SEQ ID NO: 16; SEQ ID NO: 18; SEQ ID NO: 20; SEQ ID NO: 22; SEQ ID NO: 24; SEQ ID NO: 26 and SEQ ID NO: 28; or
(iv) a nucleic acid capable of hybridizing under stringent conditions to any one of the nucleic acids given in (i), (ii) or (iii) above.

11. An isolated polypeptide comprising:
(i) an amino acid sequence having at least 80%, 85%, 90%, 95%, 96%, 97%, 98%, 99% or 100% sequence identity to any one of the amino acid sequences given in SEQ ID NO: 10, SEQ ID NO: 12, SEQ ID NO: 14, SEQ ID NO: 16, SEQ ID NO: 18, SEQ ID NO: 20, SEQ ID NO: 22, SEQ ID NO: 24; SEQ ID NO: 26 and SEQ ID NO: 28; or
(ii) a derivative of any of the amino acid sequences given in (i).

12. A construct comprising:
(i) a nucleic acid encoding a PATELLIN, PRP38, ADA2, GATA-like or a WDR23-like polypeptide, or a nucleic acid encoding the polypeptide of claim 11;
(ii) one or more control sequences capable of driving expression of the nucleic acid sequence of (a); and optionally
(iii) a transcription termination sequence.

13. A method for making plants having increased yield, increased biomass and/or increased seed yield relative to control plants comprising transforming a plant cell, plant or part thereof with the construct of claim 12.

14. A plant, plant part or plant cell transformed with the construct of claim 12.

15. A method for the production of a transgenic plant having increased yield, or increased seed yield relative to control plants, comprising:
introducing and expressing in a plant a nucleic acid encoding a PATELLIN, PRP38, ADA2, GATA-like or a WDR23-like polypeptide, or a nucleic acid encoding the polypeptide of claim 11; and
(ii) cultivating the plant cell under conditions promoting plant growth and development; and optionally
(iii) selecting for plants having enhanced yield-related traits

16. A transgenic plant having increased yield or increased seed yield relative to control plants, resulting from modulated expression of a nucleic acid encoding a PATELLIN, PRP38, ADA2, GATA-like or a WDR23-like polypeptide as defined in claim 1, or a transgenic plant cell derived from said transgenic plant.

17. The transgenic plant of claim 14, or a transgenic plant cell derived thereof, wherein said plant is a crop plant, a monocot, a cereal, rice, maize, wheat, barley, millet, rye, triticale, sorghum, or oats.

18. Harvestable parts of the plant of claim 17, wherein said harvestable parts are shoot biomass and/or seeds.

19. Products derived from the plant of claim 17 and/or from harvestable parts thereof.

20. A method for increasing yield or increasing seed yield and/or shoot biomass in a plant relative to control a plant comprising growing a plant comprising an isolated nucleic acid encoding a PATELLIN, PRP38, ADA2, GATA-like, or WDR23-like polypeptide or a nucleic acid encoding the polypeptide of claim 11.
